(19) United States
(12) Patent Application Publication
(10) Pub. No.: US 2024/0401054 A1
(43) Pub. Date: Dec. 5, 2024

(54) COMPOSITIONS AND METHODS FOR MODULATING PKK EXPRESSION

(71) Applicant: Ionis Pharmaceuticals, Inc., Carlsbad, CA (US)

(72) Inventors: Thazha P. Prakash, Carlsbad, CA (US); Punit P. Seth, Carlsbad, CA (US); Eric E. Swayze, Encinitas, CA (US); Susan M. Freier, San Diego, CA (US); Huynh-Hoa Bui, San Diego, CA (US)

(73) Assignee: Ionis Pharmaceuticals, Inc., Carlsbad, CA (US)

(21) Appl. No.: 18/158,290

(22) Filed: Aug. 26, 2024

Related U.S. Application Data
(63) Continuation of application No. 15/929,573, filed on May 11, 2020, now Pat. No. 11,613,752.
Application No. 15/929,573 is a continuation of application No. 16/363,969, filed on Mar. 25, 2019, now abandoned.
Application No. 16/363,969 is a continuation of application No. 15/308,027, filed on Oct. 31, 2016, now Pat. No. 10,294,477.
(60) Provisional application No. 62/088,459, filed on Dec. 5, 2014.
(60) Provisional application No. 62/058,629, filed on Oct. 1, 2014.
(60) Provisional application No. 61/987,478, filed on May 1, 2014.

(51) Int. Cl. C12N 15/113; C07H 21/00

(52) U.S. Cl. CPC C12N 15/1137; C07H 21/00; C12N 2310/315; C12N 2310/3341; C12N 2310/341; C12N 2310/351

(57) ABSTRACT

Disclosed herein are antisense compounds and methods for decreasing PKK mRNA and protein expression. Such methods, compounds, and compositions are useful to treat, prevent, or ameliorate PKK-associated diseases, disorders, and conditions.

### SEQUENCE LISTING

[0001] The present application is being filed along with a Sequence Listing in electronic format. The Sequence Listing is provided as a file entitled BIOL0252SEQ_corrected created Feb. 1, 2024, which is approximately 2,175,816 bytes in size. The information in the electronic format of the sequence listing is incorporated herein by reference in its entirety.

### FIELD

[0002] Provided are compounds, compositions, and methods for reducing expression of human plasma prekallikrein (PKK) mRNA and protein in an animal. Such compositions and methods are useful to treat, prevent, or ameliorate inflammatory and thromboembolic conditions.

### BACKGROUND

[0003] Plasma prekallikrein (PKK) is the precursor of plasma kallikrein (PK), which is encoded by the KLKB1 gene. PKK is a glycoprotein that participates in the surface-dependent activation of blood coagulation, fibrinolysis, kinin generation, and inflammation. PKK is converted to PK by Factor XIIa by the cleavage of an internal Arg-Ile peptide bond. PK liberates kinins from kininogens and also generates plasmin from plasminogen. PK is a member of the kinin-kallikrein pathway, which consists of several proteins that play a role in inflammation, blood pressure control, coagulation, and pain.

### SUMMARY

[0004] Provided herein are compounds, compositions, and methods for modulating expression of PKK mRNA and protein. In certain embodiments, compounds useful for modulating expression of PKK mRNA and protein are antisense compounds. In certain embodiments, the antisense compounds are antisense oligonucleotides.

[0005] In certain embodiments, modulation can occur in a cell or tissue. In certain embodiments, the cell or tissue is in an animal. In certain embodiments, the animal is a human. In certain embodiments, PKK mRNA levels are reduced. In certain embodiments, PKK protein levels are reduced. Such reduction can occur in a time-dependent manner or in a dose-dependent manner.

[0006] Also provided are compounds, compositions, and methods useful for preventing, treating, and ameliorating diseases, disorders, and conditions associated with PKK. In certain embodiments, such PKK associated diseases, disorders, and conditions are inflammatory diseases. In certain embodiments, the inflammatory disease may be an acute or chronic inflammatory disease. In certain embodiments, such inflammatory diseases may include hereditary angioedema (HAE), edema, angioedema, swelling, angioedema of the lids, ocular edema, macular edema, and cerebral edema. In certain embodiments, such PKK associated diseases, disorders, and conditions are thromboembolic diseases. In certain embodiments, such thromboembolic diseases may include thrombosis, embolism, thromboembolism, deep vein thrombosis, pulmonary embolism, myocardial infarction, stroke, and infarct.

[0007] Such diseases, disorders, and conditions can have one or more risk factors, causes, or outcomes in common.

[0008] Certain risk factors and causes for development of an inflammatory disease include genetic predisposition to an inflammatory disease and environmental factors. In certain embodiments, the subject has a mutated complement 1 esterase inhibitor (C1-INH) gene or mutated Factor 12 gene. In certain embodiments, the subject has taken or is on angiotensin-converting enzyme inhibitors (ACE inhibitors) or angiotensin II receptor blockers (ARBs). In certain embodiments, the subject has had an allergic reaction leading to angioedema. In certain embodiments, the subject has type I HAE. In certain embodiments, the subject has type II HAE. In certain embodiments, the subject has type III HAE.

[0009] Certain outcomes associated with development of an inflammatory disease include edema/swelling in various body parts including the extremities (i.e., hands, feet, arms, legs), the intestines (abdomen), the face, the genitals, the larynx (i.e., voice box); vascular permeability; vascular leakage; generalized inflammation; abdominal pain; bloating; vomiting; diarrhea; itchy skin; respiratory (asthmatic) reactions; rhinitis; anaphylaxis; bronchoconstriction; hypotension; coma; and death.

[0010] Certain risk factors and causes for development of a thromboembolic disease include genetic predisposition to a thromboembolic disease, immobility, surgery (particularly orthopedic surgery), malignancy, pregnancy, older age, use of oral contraceptives, atrial fibrillation, previous thromboembolic condition, chronic inflammatory disease, and inherited or acquired prothrombotic clotting disorders. Certain outcomes associated with development of a thromboembolic condition include decreased blood flow through an affected vessel, death of tissue, and death.

[0011] In certain embodiments, methods of treatment include administering a PKK antisense compound to an individual in need thereof. In certain embodiments, methods of treatment include administering a PKK antisense oligonucleotide to an individual in need thereof.

### DETAILED DESCRIPTION

[0012] It is to be understood that both the foregoing general description and the following detailed description are exemplary and explanatory only and are not restrictive of the invention, as claimed. Herein, the use of the singular includes the plural unless specifically stated otherwise. As used herein, the use of “or” means “and/or” unless stated otherwise. Furthermore, the use of the term “including” as well as other forms, such as “includes” and “included”, is not limiting. Also, terms such as “element” or “component” encompass both elements and components comprising one unit and elements and components that comprise more than one subunit, unless specifically stated otherwise.

[0013] Unless specific definitions are provided, the nomenclature used in connection with, and the procedures and techniques of, analytical chemistry, synthetic organic chemistry, and medicinal and pharmaceutical chemistry described herein are those well known and commonly used in the art. Standard techniques may be used for chemical synthesis, and chemical analysis. Certain such techniques and procedures may be found for example in “Carbohydrate Modifications in Antisense Research” Edited by Sangvi and Cook, American Chemical Society, Washington D.C., 1994; “Remington's Pharmaceutical Sciences,” Mack Publishing Co., Easton, Pa., 21^{St} edition, 2005; and “Antisense Drug Technology, Principles, Strategies, and Applications” Edited by Stanley T. Crooke, CRC Press, Boca Raton, Florida; and Sambrook et al., “Molecular Cloning, A laboratory Manual,” 2^{nd} Edition, Cold Spring Harbor Laboratory Press, 1989, which are hereby incorporated by reference for any purpose. Where permitted, all patents, applications, published applications and other publications and other data referred to throughout in the disclosure are incorporated by reference herein in their entirety.

[0014] The section headings used herein are for organizational purposes only and are not to be construed as limiting the subject matter described. All documents, or portions of documents, cited in this application, including, but not limited to, patents, patent applications, articles, books, and treatises, are hereby expressly incorporated by reference for the portions of the document discussed herein, as well as in their entirety.

### Definitions

[0015] Unless specific definitions are provided, the nomenclature utilized in connection with, and the procedures and techniques of, analytical chemistry, synthetic organic chemistry, and medicinal and pharmaceutical chemistry described herein are those well known and commonly used in the art. Standard techniques may be used for chemical synthesis, and chemical analysis. Where permitted, all patents, applications, published applications and other publications, GENBANK Accession Numbers and associated sequence information obtainable through databases such as National Center for Biotechnology Information (NCBI) and other data referred to throughout in the disclosure herein are incorporated by reference for the portions of the document discussed herein, as well as in their entirety.

[0016] Unless otherwise indicated, the following terms have the following meanings:

[0017] “2′-O-methoxyethyl” (also 2′-MOE and 2′-OCH₂CH₂—OCH₃ and MOE) refers to an O-methoxyethyl modification of the 2′ position of a furanose ring. A 2′-O-methoxyethyl modified sugar is a modified sugar.

[0018] “2′-O-methoxyethyl modified nucleoside” (also “2′-MOE nucleoside”) means a nucleoside comprising a 2′-MOE modified sugar moiety.

[0019] “2′-substituted nucleoside” means a nucleoside comprising a substituent at the 2′-position of the furanose ring other than H or OH. In certain embodiments, 2′ substituted nucleosides include nucleosides with bicyclic sugar modifications.

[0020] “2′-deoxynucleoside” means a nucleoside comprising a hydrogen at the 2′ position of the sugar portion of the nucleoside.

[0021] “3′ target site” refers to the nucleotide of a target nucleic acid which is complementary to the 3′-most nucleotide of a particular antisense compound.

[0022] “5′ target site” refers to the nucleotide of a target nucleic acid which is complementary to the 5′-most nucleotide of a particular antisense compound.

[0023] “5-methylcytosine” means a cytosine modified with a methyl group attached to the 5 position. A 5-methylcytosine is a modified nucleobase.

[0024] “About” means within ±7% of a value. For example, if it is stated, “the compounds affected at least about 70% inhibition of PKK”, it is implied that the PKK levels are inhibited within a range of 63% and 77%.

[0025] “Administered concomitantly” refers to the co-administration of two pharmaceutical agents in any manner in which the pharmacological effects of both are manifest in the patient at the same time. Concomitant administration does not require that both pharmaceutical agents be administered in a single pharmaceutical composition, in the same dosage form, or by the same route of administration. The effects of both pharmaceutical agents need not manifest themselves at the same time. The effects need only be overlapping for a period of time and need not be coextensive.

[0026] “Administering” means providing a pharmaceutical agent to an animal, and includes, but is not limited to administering by a medical professional and self-administering.

[0027] “Alkyl,” as used herein, means a saturated straight or branched hydrocarbon radical containing up to twenty four carbon atoms. Examples of alkyl groups include without limitation, methyl, ethyl, propyl, butyl, isopropyl, n-hexyl, octyl, decyl, dodecyl and the like. Alkyl groups typically include from 1 to about 24 carbon atoms, more typically from 1 to about 12 carbon atoms (C₁-C₁₂ alkyl) with from 1 to about 6 carbon atoms being more preferred.

[0028] As used herein, “alkenyl,” means a straight or branched hydrocarbon chain radical containing up to twenty four carbon atoms and having at least one carbon-carbon double bond. Examples of alkenyl groups include without limitation, ethenyl, propenyl, butenyl, 1-methyl-2-buten-1-yl, dienes such as 1,3-butadiene and the like. Alkenyl groups typically include from 2 to about 24 carbon atoms, more typically from 2 to about 12 carbon atoms with from 2 to about 6 carbon atoms being more preferred. Alkenyl groups as used herein may optionally include one or more further substituent groups.

[0029] As used herein, “alkynyl,” means a straight or branched hydrocarbon radical containing up to twenty four carbon atoms and having at least one carbon-carbon triple bond. Examples of alkynyl groups include, without limitation, ethynyl, 1-propynyl, 1-butynyl, and the like. Alkynyl groups typically include from 2 to about 24 carbon atoms, more typically from 2 to about 12 carbon atoms with from 2 to about 6 carbon atoms being more preferred. Alkynyl groups as used herein may optionally include one or more further substituent groups.

[0030] As used herein, “acyl,” means a radical formed by removal of a hydroxyl group from an organic acid and has the general Formula —C(O)—X where X is typically aliphatic, alicyclic or aromatic. Examples include aliphatic carbonyls, aromatic carbonyls, aliphatic sulfonyls, aromatic sulfinyls, aliphatic sulfinyls, aromatic phosphates, aliphatic phosphates and the like. Acyl groups as used herein may optionally include further substituent groups.

[0031] As used herein, “alicyclic” means a cyclic ring system wherein the ring is aliphatic. The ring system can comprise one or more rings wherein at least one ring is aliphatic. Preferred alicyclics include rings having from about 5 to about 9 carbon atoms in the ring. Alicyclic as used herein may optionally include further substituent groups.

[0032] As used herein, “aliphatic” means a straight or branched hydrocarbon radical containing up to twenty four carbon atoms wherein the saturation between any two carbon atoms is a single, double or triple bond. An aliphatic group preferably contains from 1 to about 24 carbon atoms, more typically from 1 to about 12 carbon atoms with from 1 to about 6 carbon atoms being more preferred. The straight or branched chain of an aliphatic group may be interrupted with one or more heteroatoms that include nitrogen, oxygen, sulfur and phosphorus. Such aliphatic groups interrupted by heteroatoms include without limitation, polyalkoxys, such as polyalkylene glycols, polyamines, and polyimines. Aliphatic groups as used herein may optionally include further substituent groups.

[0033] As used herein, “alkoxy” means a radical formed between an alkyl group and an oxygen atom wherein the oxygen atom is used to attach the alkoxy group to a parent molecule. Examples of alkoxy groups include without limitation, methoxy, ethoxy, propoxy, isopropoxy, n-butoxy, sec-butoxy, tert-butoxy, n-pentoxy, neopentoxy, n-hexoxy and the like. Alkoxy groups as used herein may optionally include further substituent groups.

[0034] As used herein, “aminoalkyl” means an amino substituted C₁-C₁₂ alkyl radical. The alkyl portion of the radical forms a covalent bond with a parent molecule. The amino group can be located at any position and the aminoalkyl group can be substituted with a further substituent group at the alkyl and/or amino portions.

[0035] As used herein, “aralkyl” and “arylalkyl” mean an aromatic group that is covalently linked to a C₁-C₁₂ alkyl radical. The alkyl radical portion of the resulting aralkyl (or arylalkyl) group forms a covalent bond with a parent molecule. Examples include without limitation, benzyl, phenethyl and the like. Aralkyl groups as used herein may optionally include further substituent groups attached to the alkyl, the aryl or both groups that form the radical group.

[0036] As used herein, “aryl” and “aromatic” mean a mono- or polycyclic carbocyclic ring system radicals having one or more aromatic rings. Examples of aryl groups include without limitation, phenyl, naphthyl, tetrahydronaphthyl, indanyl, idenyl and the like. Preferred aryl ring systems have from about 5 to about 20 carbon atoms in one or more rings. Aryl groups as used herein may optionally include further substituent groups.

[0037] “Amelioration” refers to a lessening, slowing, stopping, or reversing of at least one indicator of the seventy of a condition or disease. The severity of indicators may be determined by subjective or objective measures, which are known to those skilled in the art.

[0038] “Animal” refers to a human or non-human animal, including, but not limited to, mice, rats, rabbits, dogs, cats, pigs, and non-human primates, including, but not limited to, monkeys and chimpanzees.

[0039] “Antisense activity” means any detectable or measurable activity attributable to the hybridization of an antisense compound to its target nucleic acid. In certain embodiments, antisense activity is a decrease in the amount or expression of a target nucleic acid or protein encoded by such target nucleic acid. “Antisense compound” means an oligomeric compound that is is capable of undergoing hybridization to a target nucleic acid through hydrogen bonding. Examples of antisense compounds include single-stranded and double-stranded compounds, such as, antisense oligonucleotides, siRNAs, shRNAs, ssRNAs, and occupancy-based compounds.

[0040] “Antisense compound” means an oligomeric compound that is capable of undergoing hybridization to a target nucleic acid through hydrogen bonding. Examples of antisense compounds include single-stranded and double-stranded compounds, such as, antisense oligonucleotides, siRNAs, shRNAs, ssRNAs, and occupancy-based compounds.

[0041] “Antisense inhibition” means reduction of target nucleic acid levels in the presence of an antisense compound complementary to a target nucleic acid compared to target nucleic acid levels or in the absence of the antisense compound. “Antisense mechanisms” are all those mechanisms involving hybridization of a compound with target nucleic acid, wherein the outcome or effect of the hybridization is either target degradation or target occupancy with concomitant stalling of the cellular machinery involving, for example, transcription or splicing.

[0042] “Antisense mechanisms” are all those mechanisms involving hybridization of a compound with a target nucleic acid, wherein the outcome or effect of the hybridization is either target degradation or target occupancy with concomitant stalling of the cellular machinery involving, for example, transcription or splicing.

[0043] “Antisense oligonucleotide” means a single-stranded oligonucleotide having a nucleobase sequence that permits hybridization to a corresponding segment of a target nucleic acid. “Base complementarity” refers to the capacity for the precise base pairing of nucleobases of an antisense oligonucleotide with corresponding nucleobases in a target nucleic acid (i.e., hybridization), and is mediated by Watson-Crick, Hoogsteen or reversed Hoogsteen hydrogen binding between corresponding nucleobases.

[0044] “Base complementarity” refers to the capacity for the precise base pairing of nucleobases of an antisense oligonucleotide with corresponding nucleobases in a target nucleic acid (i.e., hybridization), and is mediated by Watson-Crick, Hoogsteen or reversed Hoogsteen hydrogen binding between corresponding nucleobases.

[0045] “Bicyclic sugar” means a furanose ring modified by the bridging of two atoms. A bicyclic sugar is a modified sugar.

[0046] “Bicyclic nucleoside” (also BNA) means a nucleoside having a sugar moiety comprising a bridge connecting two carbon atoms of the sugar ring, thereby forming a bicyclic ring system. In certain embodiments, the bridge connects the 4′-carbon and the 2′-carbon of the sugar ring.

[0047] “Cap structure” or “terminal cap moiety” means chemical modifications, which have been incorporated at either terminus of an antisense compound.

[0048] “Carbohydrate” means a naturally occurring carbohydrate, a modified carbohydrate, or a carbohydrate derivative.

[0049] “Carbohydrate cluster” means a compound having one or more carbohydrate residues attached to a scaffold or linker group. (see, e.g., Maier et al., “Synthesis of Antisense Oligonucleotides Conjugated to a Multivalent Carbohydrate Cluster for Cellular Targeting,” Bioconjugate Chemistry, 2003, (14): 18-29, which is incorporated herein by reference in its entirety, or Rensen et al., “Design and Synthesis of Novel N-Acetylgalactosamine-Terminated Glycolipids for Targeting of Lipoproteins to the Hepatic Asiaglycoprotein Receptor,” J. Med. Chem. 2004, (47): 5798-5808, for examples of carbohydrate conjugate clusters).

[0050] “Carbohydrate derivative” means any compound which may be synthesized using a carbohydrate as a starting material or intermediate.

[0051] “cEt” or “constrained ethyl” means a bicyclic nucleoside having a sugar moiety comprising a bridge connecting the 4′-carbon and the 2′-carbon, wherein the bridge has the formula: 4′-CH(CH₃)—O-2′.

[0052] “cEt modified nucleoside” (also “constrained ethyl nucleoside”) means a nucleoside comprising a bicyclic sugar moiety comprising a 4′-CH(CH₃)—O-2′ bridge.

[0053] “Chemically distinct region” refers to a region of an antisense compound that is in some way chemically different than another region of the same antisense compound. For example, a region having 2′-O-methoxyethyl nucleosides is chemically distinct from a region having nucleosides without 2′-O-methoxyethyl modifications.

[0054] “Chemical modification” means a chemical difference in a compound when compared to a naturally occurring counterpart. Chemical modifications of oligonucleotides include nucleoside modifications (including sugar moiety modifications and nucleobase modifications) and internucleoside linkage modifications. In reference to an oligonucleotide, chemical modification does not include differences only in nucleobase sequence.

[0055] “Chimeric antisense compound” means an antisense compound that has at least two chemically distinct regions, each position having a plurality of subunits.

[0056] “Cleavable bond” means any chemical bond capable of being split. In certain embodiments, a cleavable bond is selected from among: an amide, a polyamide, an ester, an ether, one or both esters of a phosphodiester, a phosphate ester, a carbamate, a di-sulfide, or a peptide.

[0057] “Cleavable moiety” means a bond or group that is capable of being split under physiological conditions. In certain embodiments, a cleavable moiety is cleaved inside a cell or sub-cellular compartments, such as a lysosome. In certain embodiments, a cleavable moiety is cleaved by endogenous enzymes, such as nucleases. In certain embodiments, a cleavable moiety comprises a group of atoms having one, two, three, four, or more than four cleavable bonds.

[0058] “Co-administration” means administration of two or more pharmaceutical agents to an individual. The two or more pharmaceutical agents may be in a single pharmaceutical composition, or may be in separate pharmaceutical compositions. Each of the two or more pharmaceutical agents may be administered through the same or different routes of administration. Co-administration encompasses parallel or sequential administration.

[0059] “Complementarity” means the capacity for pairing between nucleobases of a first nucleic acid and a second nucleic acid.

[0060] “Comprise,” “comprises,” and “comprising” will be understood to imply the inclusion of a stated step or element or group of steps or elements but not the exclusion of any other step or element or group of steps or elements.

[0061] “Conjugate” or “conjugate group” means an atom or group of atoms bound to an oligonucleotide or oligomeric compound. In general, conjugate groups modify one or more properties of the compound to which they are attached, including, but not limited to pharmacodynamic, pharmacokinetic, binding, absorption, cellular distribution, cellular uptake, charge and/or clearance properties.

[0062] “conjugate linker” or “linker” in the context of a conjugate group means a portion of a conjugate group comprising any atom or group of atoms and which covalently link (1) an oligonucleotide to another portion of the conjugate group or (2) two or more portions of the conjugate group.

[0063] Conjugate groups are shown herein as radicals, providing a bond for forming covalent attachment to an oligomeric compound such as an antisense oligonucleotide. In certain embodiments, the point of attachment on the oligomeric compound is the 3′-oxygen atom of the 3-hydroxyl group of the 3′ terminal nucleoside of the oligomeric compound. In certain embodiments the point of attachment on the oligomeric compound is the 5′-oxygen atom of the 5-hydroxyl group of the 5′ terminal nucleoside of the oligomeric compound. In certain embodiments, the bond for forming attachment to the oligomeric compound is a cleavable bond. In certain such embodiments, such cleavable bond constitutes all or part of a cleavable moiety.

[0064] In certain embodiments, conjugate groups comprise a cleavable moiety (e.g., a cleavable bond or cleavable nucleoside) and a carbohydrate cluster portion, such as a GalNAc cluster portion. Such carbohydrate cluster portion comprises: a targeting moiety and, optionally, a conjugate linker. In certain embodiments, the carbohydrate cluster portion is identified by the number and identity of the ligand. For example, in certain embodiments, the carbohydrate cluster portion comprises 3 GalNAc groups and is designated “GalNAc₃”. In certain embodiments, the carbohydrate cluster portion comprises 4 GalNAc groups and is designated “GalNAc₄”. Specific carbohydrate cluster portions (having specific tether, branching and conjugate linker groups) are described herein and designated by Roman numeral followed by subscript “a”. Accordingly “GalNac3-1ₐ” refers to a specific carbohydrate cluster portion of a conjugate group having 3 GalNac groups and specifically identified tether, branching and linking groups. Such carbohydrate cluster fragment is attached to an oligomeric compound via a cleavable moiety, such as a cleavable bond or cleavable nucleoside.

[0065] “Conjugate compound” means any atoms, group of atoms, or group of linked atoms suitable for use as a conjugate group. In certain embodiments, conjugate compounds may possess or impart one or more properties, including, but not limited to pharmacodynamic, pharmacokinetic, binding, absorption, cellular distribution, cellular uptake, charge and/or clearance properties.

[0066] “Contiguous nucleobases” means nucleobases immediately adjacent to each other.

[0067] “Designing” or “Designed to” refer to the process of creating an oligomeric compound that specifically hybridizes with a selected nucleic acid molecule.

[0068] “Diluent” means an ingredient in a composition that lacks pharmacological activity, but is pharmaceutically necessary or desirable. For example, in drugs that are injected, the diluent may be a liquid, e.g. saline solution.

[0069] “Dose” means a specified quantity of a pharmaceutical agent provided in a single administration, or in a specified time period. In certain embodiments, a dose may be administered in one, two, or more boluses, tablets, or injections. For example, in certain embodiments where subcutaneous administration is desired, the desired dose requires a volume not easily accommodated by a single injection, therefore, two or more injections may be used to achieve the desired dose. In certain embodiments, the pharmaceutical agent is administered by infusion over an extended period of time or continuously. Doses may be stated as the amount of pharmaceutical agent per hour, day, week, or month.

[0070] “Downstream” refers to the relative direction toward the 3′ end or C-terminal end of a nucleic acid.

[0071] “Effective amount” in the context of modulating an activity or of treating or preventing a condition means the administration of that amount of pharmaceutical agent to a subject in need of such modulation, treatment, or prophylaxis, either in a single dose or as part of a series, that is effective for modulation of that effect, or for treatment or prophylaxis or improvement of that condition. The effective amount may vary among individuals depending on the health and physical condition of the individual to be treated, the taxonomic group of the individuals to be treated, the formulation of the composition, assessment of the individual's medical condition, and other relevant factors.

[0072] “Efficacy” means the ability to produce a desired effect.

[0073] “Expression” includes all the functions by which a gene's coded information is converted into structures present and operating in a cell. Such structures include, but are not limited to the products of transcription and translation.

[0074] “Fully complementary” or “100% complementary” means each nucleobase of a first nucleic acid has a complementary nucleobase in a second nucleic acid. In certain embodiments, a first nucleic acid is an antisense compound and a target nucleic acid is a second nucleic acid.

[0075] “Gapmer” means a chimeric antisense compound in which an internal region having a plurality of nucleosides that support RNase H cleavage is positioned between external regions having one or more nucleosides, wherein the nucleosides comprising the internal region are chemically distinct from the nucleoside or nucleosides comprising the external regions. The internal region may be referred to as a “gap” and the external regions may be referred to as the “wings.”

[0076] “Halo” and “halogen,” mean an atom selected from fluorine, chlorine, bromine and iodine.

[0077] “Heteroaryl,” and “heteroaromatic,” mean a radical comprising a mono- or poly-cyclic aromatic ring, ring system or fused ring system wherein at least one of the rings is aromatic and includes one or more heteroatoms. Heteroaryl is also meant to include fused ring systems including systems where one or more of the fused rings contain no heteroatoms. Heteroaryl groups typically include one ring atom selected from sulfur, nitrogen or oxygen. Examples of heteroaryl groups include without limitation, pyridinyl, pyrazinyl, pyrimidinyl, pyrrolyl, pyrazolyl, imidazolyl, thiazolyl, oxazolyl, isooxazolyl, thiadiazolyl, oxadiazolyl, thiophenyl, furanyl, quinolinyl, isoquinolinyl, benzimidazolyl, benzooxazolyl, quinoxalinyl and the like. Heteroaryl radicals can be attached to a parent molecule directly or through a linking moiety such as an aliphatic group or hetero atom. Heteroaryl groups as used herein may optionally include further substituent groups.

[0078] “Hybridization” means the annealing of complementary nucleic acid molecules. In certain embodiments, complementary nucleic acid molecules include, but are not limited to, an antisense compound and a target nucleic acid. In certain embodiments, complementary nucleic acid molecules include, but are not limited to, an antisense oligonucleotide and a nucleic acid target.

[0079] “Identifying an animal having an inflammatory disease” means identifying an animal having been diagnosed with an inflammatory disease or predisposed to develop an inflammatory disease. Individuals predisposed to develop an inflammatory disease include those having one or more risk factors for developing an inflammatory disease including environmental factors, having a personal or family history, or genetic predisposition to one or more inflammatory disease. Such identification may be accomplished by any method including evaluating an individual's medical history and standard clinical tests or assessments, such as genetic testing.

[0080] “Identifying an animal having a PKK associated disease” means identifying an animal having been diagnosed with a PKK associated disease or predisposed to develop a PKK associated disease. Individuals predisposed to develop a PKK associated disease include those having one or more risk factors for developing a PKK associated disease including having a personal or family history, or genetic predisposition of one or more PKK associated diseases. Such identification may be accomplished by any method including evaluating an individual's medical history and standard clinical tests or assessments, such as genetic testing.

[0081] “Identifying an animal having a thromboembolic disease” means identifying an animal having been diagnosed with a thromboembolic disease or predisposed to develop a thromboembolic disease. Individuals predisposed to develop a thromboembolic disease include those having one or more risk factors for developing a thromboembolic disease including having a personal or family history, or genetic predisposition of one or more thromboembolic diseases, immobility, surgery (particularly orthopedic surgery), malignancy, pregnancy, older age, use of oral contraceptives, atrial fibrillation, previous thromboembolic condition, chronic inflammatory disease, and inherited or acquired prothrombotic clotting disorders. Such identification may be accomplished by any method including evaluating an individual's medical history and standard clinical tests or assessments, such as genetic testing.

[0082] “Immediately adjacent” means there are no intervening elements between the immediately adjacent elements. “Individual” means a human or non-human animal selected for treatment or therapy.

[0083] “Individual” means a human or non-human animal selected for treatment or therapy.

[0084] “Inhibiting PKK” means reducing the level or expression of a PKK mRNA and/or protein. In certain embodiments, PKK mRNA and/or protein levels are inhibited in the presence of an antisense compound targeting PKK, including an antisense oligonucleotide targeting PKK, as compared to expression of PKK mRNA and/or protein levels in the absence of a PKK antisense compound, such as an antisense oligonucleotide.

[0085] “Inhibiting the expression or activity” refers to a reduction or blockade of the expression or activity and does not necessarily indicate a total elimination of expression or activity.

[0086] “Internucleoside linkage” refers to the chemical bond between nucleosides.

[0087] “Internucleoside neutral linking group” means a neutral linking group that directly links two nucleosides.

[0088] “Internucleoside phosphorus linking group” means a phosphorus linking group that directly links two nucleosides.

[0089] “Linkage motif” means a pattern of linkage modifications in an oligonucleotide or region thereof. The nucleosides of such an oligonucleotide may be modified or unmodified. Unless otherwise indicated, motifs herein describing only linkages are intended to be linkage motifs. Thus, in such instances, the nucleosides are not limited.

[0090] “Linked nucleosides” means adjacent nucleosides linked together by an internucleoside linkage. “Locked nucleic acid” or “LNA” or “LNA nucleosides” means nucleic acid monomers having a bridge connecting two carbon atoms between the 4′ and 2′ position of the nucleoside sugar unit, thereby forming a bicyclic sugar. Examples of such bicyclic sugar include, but are not limited to A) α-L-Methyleneoxy (4′-CH₂—O-2′) LNA, (B) β-D-Methyleneoxy (4′-CH₂—O-2′) LNA, (C) Ethyleneoxy (4′—(CH₂)₂-O-2′) LNA, (D) Aminooxy (4′-CH₂—O—N(R)-2′) LNA and (E) Oxyamino (4′-CH₂—N(R)—O-2′) LNA, as depicted below.

[chemical structure]

[0091] As used herein, LNA compounds include, but are not limited to, compounds having at least one bridge between the 4′ and the 2′ position of the sugar wherein each of the bridges independently comprises 1 or from 2 to 4 linked groups independently selected from —[C(R₁)(R₂)]ₙ—, —C(R₁)═C(R₂)—, —C(R₁)=N—, —C(═NR₁)—, —C(═O)—, —C(═S)—, —O—, —Si(R₁)₂—, —S(═O)ᵣ— and —N(R₁)—; wherein: x is 0, 1, or 2; n is 1, 2, 3, or 4; each R₁ and R₂ is, independently, H, a protecting group, hydroxyl, C₁-C₁₂ alkyl, substituted C₁-C₁₂ alkyl, C₂-C₁₂ alkenyl, substituted C₂-C₁₂ alkenyl, C₂-C₁₂ alkynyl, substituted C₂-C₁₂ alkynyl, C₅-C₂₀ aryl, substituted C₅-C₂₀ aryl, a heterocycle radical, a substituted heterocycle radical, heteroaryl, substituted heteroaryl, C₅-C₇ alicyclic radical, substituted C₅-C₇ alicyclic radical, halogen, OJ₁, NJ₁J₂, SJ₁, N₃, COOJ₁, acyl (C(═O)—H), substituted acyl, CN, sulfonyl (S(═O)₂-J₁), or sulfoxyl (S(═O)-J₁); and each J₁ and J₂ is, independently, H, C₁-C₁₂ alkyl, substituted C₁-C₁₂ alkyl, C₂-C₁₂ alkenyl, substituted C₂-C₁₂ alkenyl, C₂-C₁₂ alkynyl, substituted C₂-C₁₂ alkynyl, C₅-C₂₀ aryl, substituted C₅-C₂₀ aryl, acyl (C(═O)—H), substituted acyl, a heterocycle radical, a substituted heterocycle radical, C₁-C₁₂ aminoalkyl, substituted C₁-C₁₂ aminoalkyl or a protecting group.

[0092] Examples of 4′-2′ bridging groups encompassed within the definition of LNA include, but are not limited to one of formulae: —[C(R₁)(R₂)]ₙ—, —[C(R₁)(R₂)]ₙ—O—, —C(R₁R₂)—N(R₁)—O— or —C(R₁R₂)—O—N(R₁)—. Furthermore, other bridging groups encompassed with the definition of LNA are 4′-CH₂-2′, 4′—(CH₂)₂-2′, 4′—(CH₂)₃-2′, 4′—CH₂—O-2′, 4′—(CH₂)₂-O-2′, 4′—CH₂—O—N(R₁)-2′ and 4′-CH₂—N(R₁)—O-2′-bridges, wherein each R₁ and R₂ is, independently, H, a protecting group or C₁-C₁₂ alkyl.

[0093] Also included within the definition of LNA according to the invention are LNAs in which the 2′-hydroxyl group of the ribosyl sugar ring is connected to the 4′ carbon atom of the sugar ring, thereby forming a methyleneoxy (4′-CH₂—O-2′) bridge to form the bicyclic sugar moiety. The bridge can also be a methylene (—CH₂—) group connecting the 2′ oxygen atom and the 4′ carbon atom, for which the term methyleneoxy (4′-CH₂—O-2′) LNA is used. Furthermore; in the case of the bicylic sugar moiety having an ethylene bridging group in this position, the term ethyleneoxy (4′-CH₂CH₂—O-2′) LNA is used. α-L-methyleneoxy (4′-CH₂—O-2′), an isomer of methyleneoxy (4′-CH₂—O-2′) LNA is also encompassed within the definition of LNA, as used herein.

[0094] “Mismatch” or “non-complementary nucleobase” refers to the case when a nucleobase of a first nucleic acid is not capable of pairing with the corresponding nucleobase of a second or target nucleic acid.

[0095] “Modified internucleoside linkage” refers to a substitution or any change from a naturally occurring internucleoside bond (i.e. a phosphodiester internucleoside bond).

[0096] “Modified nucleobase” means any nucleobase other than adenine, cytosine, guanine, thymidine (also known as 5-methyluracil), or uracil. An “unmodified nucleobase” means the purine bases adenine (A) and guanine (G), and the pyrimidine bases thymine (T), cytosine (C), and uracil (U).

[0097] “Modified nucleoside” means a nucleoside having, independently, a modified sugar moiety and/or modified nucleobase.

[0098] “Modified nucleotide” means a nucleotide having, independently, a modified sugar moiety, modified internucleoside linkage, and/or modified nucleobase.

[0099] “Modified oligonucleotide” means an oligonucleotide comprising at least one modified internucleoside linkage, modified sugar, and/or modified nucleobase.

[0100] “Modified sugar” means substitution and/or any change from a natural sugar moiety.

[0101] “Mono or polycyclic ring system” is meant to include all ring systems selected from single or polycyclic radical ring systems wherein the rings are fused or linked and is meant to be inclusive of single and mixed ring systems individually selected from aliphatic, alicyclic, aryl, heteroaryl, aralkyl, arylalkyl, heterocyclic, heteroaryl, heteroaromatic and heteroarylalkyl. Such mono and poly cyclic structures can contain rings that each have the same level of saturation or each, independently, have varying degrees of saturation including fully saturated, partially saturated or fully unsaturated. Each ring can comprise ring atoms selected from C, N, O and S to give rise to heterocyclic rings as well as rings comprising only C ring atoms which can be present in a mixed motif such as for example benzimidazole wherein one ring has only carbon ring atoms and the fused ring has two nitrogen atoms. The mono or polycyclic ring system can be further substituted with substituent groups such as for example phthalimide which has two=0 groups attached to one of the rings. Mono or polycyclic ring systems can be attached to parent molecules using various strategies such as directly through a ring atom, fused through multiple ring atoms, through a substituent group or through a bifunctional linking moiety.

[0102] “Monomer” means a single unit of an oligomer. Monomers include, but are not limited to, nucleosides and nucleotides, whether naturally occurring or modified.

[0103] “Motif” means the pattern of unmodified and modified nucleosides in an antisense compound.

[0104] “Natural sugar moiety” means a sugar moiety found in DNA (2′-H) or RNA (2′-OH).

[0105] “Naturally occurring internucleoside linkage” means a 3′ to 5′ phosphodiester linkage.

[0106] “Neutral linking group” means a linking group that is not charged. Neutral linking groups include without limitation phosphotriesters, methylphosphonates, MMI (—CH₂—N(CH₃)—O—), amide-3 (—CH₂—C(═O)—N(H)—), amide-4 (—CH₂—N(H)—C(═O)—), formacetal (—O—CH₂—O—), and thioformacetal (—S—CH₂—O—). Further neutral linking groups include nonionic linkages comprising siloxane (dialkylsiloxane), carboxylate ester, carboxamide, sulfide, sulfonate ester and amides (See for example: Carbohydrate Modifications in Antisense Research; Y. S. Sanghvi and P. D. Cook Eds. ACS Symposium Series 580; Chapters 3 and 4, (pp. 40-65)). Further neutral linking groups include nonionic linkages comprising mixed N, O, S and CH₂ component parts.

[0107] “Non-complementary nucleobase” refers to a pair of nucleobases that do not form hydrogen bonds with one another or otherwise support hybridization.

[0108] “Non-internucleoside neutral linking group” means a neutral linking group that does not directly link two nucleosides. In certain embodiments, a non-internucleoside neutral linking group links a nucleoside to a group other than a nucleoside. In certain embodiments, a non-internucleoside neutral linking group links two groups, neither of which is a nucleoside.

[0109] “Non-internucleoside phosphorus linking group” means a phosphorus linking group that does not directly link two nucleosides. In certain embodiments, a non-internucleoside phosphorus linking group links a nucleoside to a group other than a nucleoside. In certain embodiments, a non-internucleoside phosphorus linking group links two groups, neither of which is a nucleoside.

[0110] “Nucleic acid” refers to molecules composed of monomeric nucleotides. A nucleic acid includes, but is not limited to, ribonucleic acids (RNA), deoxyribonucleic acids (DNA), single-stranded nucleic acids, double-stranded nucleic acids, small interfering ribonucleic acids (siRNA), and microRNAs (miRNA).

[0111] “Nucleobase” means a heterocyclic moiety capable of pairing with a base of another nucleic acid.

[0112] “Nucleobase complementarity” refers to a nucleobase that is capable of base pairing with another nucleobase. For example, in DNA, adenine (A) is complementary to thymine (T). For example, in RNA, adenine (A) is complementary to uracil (U). In certain embodiments, complementary nucleobase refers to a nucleobase of an antisense compound that is capable of base pairing with a nucleobase of its target nucleic acid. For example, if a nucleobase at a certain position of an antisense compound is capable of hydrogen bonding with a nucleobase at a certain position of a target nucleic acid, then the position of hydrogen bonding between the oligonucleotide and the target nucleic acid is considered to be complementary at that nucleobase pair.

[0113] “Nucleobase modification motif” means a pattern of modifications to nucleobases along an oligonucleotide. Unless otherwise indicated, a nucleobase modification motif is independent of the nucleobase sequence.

[0114] “Nucleobase sequence” means the order of contiguous nucleobases independent of any sugar, linkage, and/or nucleobase modification.

[0115] “Nucleoside” means a nucleobase linked to a sugar.

[0116] “Nucleoside mimetic” includes those structures used to replace the sugar or the sugar and the base and not necessarily the linkage at one or more positions of an oligomeric compound such as for example nucleoside mimetics having morpholino, cyclohexenyl, cyclohexyl, tetrahydropyranyl, bicyclo, or tricyclo sugar mimetics, e.g., non furanose sugar units. Nucleotide mimetic includes those structures used to replace the nucleoside and the linkage at one or more positions of an oligomeric compound such as for example peptide nucleic acids or morpholinos (morpholinos linked by —N(H)—C(═O)—O— or other non-phosphodiester linkage). Sugar surrogate overlaps with the slightly broader term nucleoside mimetic but is intended to indicate replacement of the sugar unit (furanose ring) only. The tetrahydropyranyl rings provided herein are illustrative of an example of a sugar surrogate wherein the furanose sugar group has been replaced with a tetrahydropyranyl ring system. “Mimetic” refers to groups that are substituted for a sugar, a nucleobase, and/or internucleoside linkage. Generally, a mimetic is used in place of the sugar or sugar-internucleoside linkage combination, and the nucleobase is maintained for hybridization to a selected target.

[0117] “Nucleoside motif” means a pattern of nucleoside modifications in an oligonucleotide or a region thereof. The linkages of such an oligonucleotide may be modified or unmodified. Unless otherwise indicated, motifs herein describing only nucleosides are intended to be nucleoside motifs. Thus, in such instances, the linkages are not limited.

[0118] “Nucleotide” means a nucleoside having a phosphate group covalently linked to the sugar portion of the nucleoside.

[0119] “Off-target effect” refers to an unwanted or deleterious biological effect associated with modulation of RNA or protein expression of a gene other than the intended target nucleic acid.

[0120] “Oligomeric compound” or “oligomer” means a polymer of linked monomeric subunits which is capable of hybridizing to at least a region of a nucleic acid molecule.

[0121] “Oligonucleotide” means a polymer of linked nucleosides each of which can be modified or unmodified, independent one from another.

[0122] “Parenteral administration” means administration through injection (e.g., bolus injection) or infusion. Parenteral administration includes subcutaneous administration, intravenous administration, intramuscular administration, intraarterial administration, intraperitoneal administration, or intracranial administration, e.g., intrathecal or intracerebroventricular administration.

[0123] “Peptide” means a molecule formed by linking at least two amino acids by amide bonds. Without limitation, as used herein, peptide refers to polypeptides and proteins.

[0124] “Pharmaceutical agent” means a substance that provides a therapeutic benefit when administered to an individual. For example, in certain embodiments, an antisense oligonucleotide targeted to PKK is a pharmaceutical agent.

[0125] “Pharmaceutical composition” means a mixture of substances suitable for administering to a subject. For example, a pharmaceutical composition may comprise an antisense oligonucleotide and a sterile aqueous solution.

[0126] “Pharmaceutically acceptable derivative” encompasses pharmaceutically acceptable salts, conjugates, prodrugs or isomers of the compounds described herein.

[0127] “Pharmaceutically acceptable salts” means physiologically and pharmaceutically acceptable salts of antisense compounds, i.e., salts that retain the desired biological activity of the parent oligonucleotide and do not impart undesired toxicological effects thereto.

[0128] “Phosphorothioate linkage” means a linkage between nucleosides where the phosphodiester bond is modified by replacing one of the non-bridging oxygen atoms with a sulfur atom. A phosphorothioate linkage is a modified internucleoside linkage.

[0129] “Phosphorus linking group” means a linking group comprising a phosphorus atom. Phosphorus linking groups include without limitation groups having the formula:

[chemical structure]

wherein:
[0130] Rₐ and R_{d} are each, independently, O, S, CH₂, NH, or NJ₁ wherein J₁ is C₁-C₆ alkyl or substituted C₁-C₆ alkyl;
[0131] R_{b} is O or S;
[0132] R_{c} is OH, SH, C₁-C₆ alkyl, substituted C₁-C₆ alkyl, C₁-C₆ alkoxy, substituted C₁-C₆ alkoxy, amino or substituted amino; and
[0133] J₁ is R is O or S.

[0134] Phosphorus linking groups include without limitation, phosphodiester, phosphorothioate, phosphorodithioate, phosphonate, phosphoramidate, phosphorothioamidate, thionoalkylphosphonate, phosphotriesters, thionoalkylphosphotriester and boranophosphate.

[0135] “PKK” means mammalian plasma prekallikrein, including human plasma prekallikrein. Plasma prekallikrein (PKK) is the precursor of plasma kallikrein (PK), which is encoded by the KLKB1 gene.

[0136] “PKK associated disease” means any disease associated with any PKK nucleic acid or expression product thereof. Such diseases may include an inflammatory disease or a thromboembolic disease. Such diseases may include hereditary angioedema (HAE).

[0137] “PKK mRNA” means any messenger RNA expression product of a DNA sequence encoding PKK.

[0138] “PKK nucleic acid” means any nucleic acid encoding PKK. For example, in certain embodiments, a PKK nucleic acid includes a DNA sequence encoding PKK, an RNA sequence transcribed from DNA encoding PKK (including genomic DNA comprising introns and exons), and an mRNA sequence encoding PKK. “PKK mRNA” means an mRNA encoding a PKK protein.

[0139] “PKK protein” means the polypeptide expression product of a PKK nucleic acid.

[0140] “Portion” means a defined number of contiguous (i.e., linked) nucleobases of a nucleic acid. In certain embodiments, a portion is a defined number of contiguous nucleobases of a target nucleic acid. In certain embodiments, a portion is a defined number of contiguous nucleobases of an antisense compound.

[0141] “Prevent” or “preventing” refers to delaying or forestalling the onset or development of a disease, disorder, or condition for a period of time from minutes to days, weeks to months, or indefinitely.

[0142] “Prodrug” means a therapeutic agent that is prepared in an inactive form that is converted to an active form (i.e., drug) within the body or cells thereof by the action of endogenous enzymes or other chemicals and/or conditions.

[0143] “Prophylactically effective amount” refers to an amount of a pharmaceutical agent that provides a prophylactic or preventative benefit to an animal.

[0144] “Protecting group” means any compound or protecting group known to those having skill in the art. Non-limiting examples of protecting groups may be found in “Protective Groups in Organic Chemistry”, T. W. Greene, P. G. M. Wuts, ISBN 0-471-62301-6, John Wiley & Sons, Inc, New York, which is incorporated herein by reference in its entirety.

[0145] “Region” is defined as a portion of the target nucleic acid having at least one identifiable structure, function, or characteristic.

[0146] “Ribonucleotide” means a nucleotide having a hydroxy at the 2′ position of the sugar portion of the nucleotide. Ribonucleotides may be modified with any of a variety of substituents.

[0147] “RISC based antisense compound” means an antisense compound wherein at least some of the antisense activity of the antisense compound is attributable to the RNA Induced Silencing Complex (RISC).

[0148] “RNase H based antisense compound” means an antisense compound wherein at least some of the antisense activity of the antisense compound is attributable to hybridization of the antisense compound to a target nucleic acid and subsequent cleavage of the target nucleic acid by RNase H.

[0149] “Salts” mean a physiologically and pharmaceutically acceptable salts of antisense compounds, i.e., salts that retain the desired biological activity of the parent oligonucleotide and do not impart undesired toxicological effects thereto.

[0150] “Segments” are defined as smaller or sub-portions of regions within a target nucleic acid.

[0151] “Separate regions” means portions of an oligonucleotide wherein the chemical modifications or the motif of chemical modifications of any neighboring portions include at least one difference to allow the separate regions to be distinguished from one another.

[0152] “Sequence motif” means a pattern of nucleobases arranged along an oligonucleotide or portion thereof. Unless otherwise indicated, a sequence motif is independent of chemical modifications and thus may have any combination of chemical modifications, including no chemical modifications.

[0153] “Side effects” means physiological responses attributable to a treatment other than desired effects. In certain embodiments, side effects include, without limitation, injection site reactions, liver function test abnormalities, renal function abnormalities, liver toxicity, renal toxicity, central nervous system abnormalities, and myopathies.

[0154] “Single-stranded oligonucleotide” means an oligonucleotide which is not hybridized to a complementary strand.

[0155] “Sites,” as used herein, are defined as unique nucleobase positions within a target nucleic acid.

[0156] “Specifically hybridizable” or “specifically hybridizes” refers to an antisense compound having a sufficient degree of complementarity between an antisense oligonucleotide and a target nucleic acid to induce a desired effect, while exhibiting minimal or no effects on non-target nucleic acids under conditions in which specific binding is desired, i.e., under physiological conditions in the case of in vivo assays and therapeutic treatments.

[0157] “Stringent hybridization conditions” or “stringent conditions” refer to conditions under which an oligomeric compound will hybridize to its target sequence, but to a minimal number of other sequences.

[0158] “Subject” means a human or non-human animal selected for treatment or therapy.

[0159] “Substituent” and “substituent group,” means an atom or group that replaces the atom or group of a named parent compound. For example a substituent of a modified nucleoside is any atom or group that differs from the atom or group found in a naturally occurring nucleoside (e.g., a modified 2′-substuent is any atom or group at the 2′-position of a nucleoside other than H or OH). Substituent groups can be protected or unprotected. In certain embodiments, compounds of the present disclosure have substituents at one or at more than one position of the parent compound. Substituents may also be further substituted with other substituent groups and may be attached directly or via a linking group such as an alkyl or hydrocarbyl group to a parent compound.

[0160] Likewise, as used herein, “substituent” in reference to a chemical functional group means an atom or group of atoms that differs from the atom or a group of atoms normally present in the named functional group. In certain embodiments, a substituent replaces a hydrogen atom of the functional group (e.g., in certain embodiments, the substituent of a substituted methyl group is an atom or group other than hydrogen which replaces one of the hydrogen atoms of an unsubstituted methyl group). Unless otherwise indicated, groups amenable for use as substituents include without limitation, halogen, hydroxyl, alkyl, alkenyl, alkynyl, acyl (—C(O)Rₐₐ), carboxyl (—C(O)O—Rₐₐ), aliphatic groups, alicyclic groups, alkoxy, substituted oxy (—O—Rₐₐ), aryl, aralkyl, heterocyclic radical, heteroaryl, heteroarylalkyl, amino (—N(R_{bb})(R_{cc})), imino(=NR_{bb}), amido (—C(O)N—(R_{bb})(R_{cc}) or —N(R_{bb})C(O)Rₐₐ), azido (—N₃), nitro (—NO₂), cyano (—CN), carbamido (—OC(O)N(R_{bb})(R_{cc}) or —N(R_{bb})C(O)ORₐₐ), ureido (—N(R_{bb})C(O)N(R_{bb})(R_{c})), thioureido (—N(R_{bb})C(S)N(R_{bb})(R_{cc})), guanidinyl (—N(R_{bb})C(=NR_{bb})N(R_{bb})(R_{cc})), amidinyl (—C(═NR_{bb})N(R_{bb})(R_{cc}) or —N(R_{bb})C(=NR_{bb})(Rₐₐ)), thiol (—SR_{bb}), sulfinyl (—S(O)R_{bb}), sulfonyl (—S(O)₂R_{bb}) and sulfonamidyl (—S(O)₂N(R_{bb})(R_{cc}) or —N(R_{bb})S(O)₂R_{bb}). Wherein each Rₐₐ, R_{bb} and R_{cc} is, independently, H, an optionally linked chemical functional group or a further substituent group with a preferred list including without limitation, alkyl, alkenyl, alkynyl, aliphatic, alkoxy, acyl, aryl, aralkyl, heteroaryl, alicyclic, heterocyclic and heteroarylalkyl. Selected substituents within the compounds described herein are present to a recursive degree.

[0161] “Substituted sugar moiety” means a furanosyl that is not a naturally occurring sugar moiety. Substituted sugar moieties include, but are not limited to furanosyls comprising substituents at the 2′-position, the 3′-position, the 5′-position and/or the 4′-position. Certain substituted sugar moieties are bicyclic sugar moieties.

[0162] “Sugar moiety” means a naturally occurring sugar moiety or a modified sugar moiety of a nucleoside.

[0163] “Sugar motif” means a pattern of sugar modifications in an oligonucleotide or a region thereof.

[0164] “Sugar surrogate” means a structure that does not comprise a furanosyl and that is capable of replacing the naturally occurring sugar moiety of a nucleoside, such that the resulting nucleoside sub-units are capable of linking together and/or linking to other nucleosides to form an oligomeric compound which is capable of hybridizing to a complementary oligomeric compound. Such structures include rings comprising a different number of atoms than furanosyl (e.g., 4, 6, or 7-membered rings); replacement of the oxygen of a furanosyl with a non-oxygen atom (e.g., carbon, sulfur, or nitrogen); or both a change in the number of atoms and a replacement of the oxygen. Such structures may also comprise substitutions corresponding to those described for substituted sugar moieties (e.g., 6-membered carbocyclic bicyclic sugar surrogates optionally comprising additional substituents). Sugar surrogates also include more complex sugar replacements (e.g., the non-ring systems of peptide nucleic acid). Sugar surrogates include without limitation morpholinos, cyclohexenyls and cyclohexitols.

[0165] “Target” refers to a protein, the modulation of which is desired.

[0166] “Target gene” refers to a gene encoding a target.

[0167] “Targeting” or “targeted” means the process of design and selection of an antisense compound that will specifically hybridize to a target nucleic acid and induce a desired effect.

[0168] “Target nucleic acid,” “target RNA,” and “target RNA transcript” and “nucleic acid target” all mean a nucleic acid capable of being targeted by antisense compounds.

[0169] “Target region” means a portion of a target nucleic acid to which one or more antisense compounds is targeted.

[0170] “Target segment” means the sequence of nucleotides of a target nucleic acid to which an antisense compound is targeted. “5′ target site” refers to the 5′-most nucleotide of a target segment. “3′ target site” refers to the 3′-most nucleotide of a target segment.

[0171] “Terminal group” means one or more atom attached to either, or both, the 3′ end or the 5′ end of an oligonucleotide. In certain embodiments a terminal group is a conjugate group. In certain embodiments, a terminal group comprises one or more terminal group nucleosides.

[0172] “Terminal internucleoside linkage” means the linkage between the last two nucleosides of an oligonucleotide or defined region thereof.

[0173] “Therapeutically effective amount” means an amount of a pharmaceutical agent that provides a therapeutic benefit to an individual.

[0174] “Treat” or “treating” or “treatment” refers to administering a composition to effect an improvement of the disease or condition.

[0175] “Type of modification” in reference to a nucleoside or a nucleoside of a “type” means the chemical modification of a nucleoside and includes modified and unmodified nucleosides. Accordingly, unless otherwise indicated, a “nucleoside having a modification of a first type” may be an unmodified nucleoside.

[0176] “Unmodified nucleobases” mean the purine bases adenine (A) and guanine (G), and the pyrimidine bases thymine (T), cytosine (C) and uracil (U).

[0177] “Unmodified nucleotide” means a nucleotide composed of naturally occurring nucleobases, sugar moieties, and internucleoside linkages. In certain embodiments, an unmodified nucleotide is an RNA nucleotide (i.e. β-D-ribonucleosides) or a DNA nucleotide (i.e. β-D-deoxyribonucleoside).

[0178] “Upstream” refers to the relative direction toward the 5′ end or N-terminal end of a nucleic acid.

[0179] “Wing segment” means a plurality of nucleosides modified to impart to an oligonucleotide properties such as enhanced inhibitory activity, increased binding affinity for a target nucleic acid, or resistance to degradation by in vivo nucleases.

### Certain Embodiments

[0180] Certain embodiments provide compounds, compositions, and methods for inhibiting plasma prekallikrein (PKK) mRNA and protein expression. Certain embodiments provide compounds, compositions, and methods for decreasing PKK mRNA and protein levels.

[0181] Certain embodiments provide antisense compounds targeted to a plasma prekallikrein (PKK) nucleic acid. In certain embodiments, the PKK nucleic acid is the sequence set forth in GENBANK Accession No. NM_000892.3 (incorporated herein as SEQ ID NO: 1), GENBANK Accession No. DC412984.1 (incorporated herein as SEQ ID NO: 2), GENBANK Accession No. CN265612.1 (incorporated herein as SEQ ID NO: 3), GENBANK Accession No. AK297672.1 (incorporated herein as SEQ ID NO: 4), GENBANK Accession No. DC413312.1 (incorporated herein as SEQ ID NO: 5), GENBANK Accession No. AV688858.2 (incorporated herein as SEQ ID NO: 6), GENBANK Accession No. CD652077.1 (incorporated herein as SEQ ID NO: 7), GENBANK Accession No. BC143911.1 (incorporated herein as SEQ ID NO: 8), GENBANK Accession No. CB162532.1 (incorporated herein as SEQ ID NO: 9), GENBANK Accession No. NT_016354.19 truncated from nucleobases 111693001 to 111730000 (incorporated herein as SEQ ID NO: 10), GENBANK Accession No. NM_008455.2 (incorporated herein as SEQ ID NO: 11), GENBANK Accession No. BB598673.1 (incorporated herein as SEQ ID NO: 12), GENBANK Accession No. NT_039460.7 truncated from nucleobases 6114001 to U.S. Pat. No. 6,144,000 (incorporated herein as SEQ ID NO: 13), GENBANK Accession No. NM_012725.2 (incorporated herein as SEQ ID NO: 14), GENBANK Accession No. NW_047473.1 truncated from nucleobases 10952001 to 10982000 (incorporated herein as SEQ ID NO: 15), GENBANK Accession No. XM_002804276.1 (incorporated herein as SEQ ID NO: 17), and GENBANK Accession No. NW_001118167.1 truncated from nucleobases 2358000 to U.S. Pat. No. 2,391,000 (incorporated herein as SEQ ID NO: 18).

[0182] Certain embodiments provide compounds, comprising a modified oligonucleotide and a conjugate group, wherein the modified oligonucleotide consists of 12 to 30 linked nucleosides and has a nucleobase sequence comprising at least 8, at least 9, at least 10, at least 11, at least 12, at least 13, at least 14, at least 15, at least 16, at least 17, at least 18, at least 19, or at least 20 consecutive nucleobases of any of the nucleobase sequences of SEQ ID NOs: 30-2226.

[0183] Certain embodiments provide compounds, comprising a modified oligonucleotide and a conjugate group, wherein the modified oligonucleotide consists of 12 to 30 linked nucleosides and has a nucleobase sequence comprising at least 8, at least 9, at least 10, at least 11, at least 12, at least 13, at least 14, at least 15, at least 16, at least 17, at least 18, at least 19, or at least 20 consecutive nucleobases of the nucleobase sequence of SEQ ID NO: 570.

[0184] Certain embodiments provide compounds, comprising a modified oligonucleotide and a conjugate group, wherein the modified oligonucleotide consists of 12 to 30 linked nucleosides and has a nucleobase sequence comprising at least 8, at least 9, at least 10, at least 11, at least 12, at least 13, at least 14, at least 15, at least 16, at least 17, at least 18, at least 19, or at least 20 consecutive nucleobases of the nucleobase sequence of SEQ ID NO: 705.

[0185] Certain embodiments provide compounds, comprising a modified oligonucleotide and a conjugate group, wherein the modified oligonucleotide consists of 12 to 30 linked nucleosides and has a nucleobase sequence comprising at least 8, at least 9, at least 10, at least 11, at least 12, at least 13, at least 14, at least 15, or at least 16 consecutive nucleobases of the nucleobase sequence of SEQ ID NO: 1666.

[0186] Certain embodiments provide compounds, comprising a modified oligonucleotide and a conjugate group, wherein the modified oligonucleotide consists of 20 linked nucleosides and has the nucleobase sequence of SEQ ID NO: 570.

[0187] Certain embodiments provide compounds, comprising a modified oligonucleotide and a conjugate group, wherein the modified oligonucleotide consists of 20 linked nucleosides and has the nucleobase sequence of SEQ ID NO: 705.

[0188] Certain embodiments provide compounds, comprising a modified oligonucleotide and a conjugate group, wherein the modified oligonucleotide consists of 16 linked nucleosides and has the nucleobase sequence of SEQ ID NO: 1666.

[0189] Certain embodiments provide compounds, comprising a modified oligonucleotide and a conjugate group, wherein the modified oligonucleotide consists of 12 to 30 linked nucleosides and has a nucleobase sequence comprising at least 8, at least 9, at least 10, at least 11, at least 12, at least 13, at least 14, at least 15, or at least 16 consecutive nucleobases of any of the nucleobase sequences of SEQ ID NOs: 62, 72, 103, 213, 312, 334-339, 344, 345, 346, 348, 349, 351, 369, 373, 381, 382, 383, 385, 387-391, 399, 411, 412, 414, 416, 444, 446-449, 452, 453, 454, 459, 460, 462-472, 473, 476, 477, 479, 480, 481, 484, 489-495, 497, 500, 504, 506, 522, 526, 535, 558, 559, 560, 564, 566, 568-571, 573, 576, 577, 578, 587, 595, 597-604, 607, 608, 610, 613, 615, 618, 619, 622, 623, 624, 633, 635, 636, 638, 639, 640, 642, 643, 645, 652, 655-658, 660, 661, 670, 674-679, 684, 685, 698, 704, 705, 707, 708, 713, 716, 717, 728, 734, 736, 767, 768, 776, 797, 798, 800, 802, 810, 815, 876, 880, 882, 883, 886, 891, 901-905, 908-911, 922, 923, 924, 931, 942, 950-957, 972, 974, 978, 979, 980, 987-991, 1005, 1017-1021, 1025, 1026, 1029, 1030, 1032, 1034, 1035, 1037, 1040, 1041, 1045, 1046, 1051, 1054, 1059, 1060, 1061, 1064, 1065, 1066, 1075, 1076, 1087, 1089, 1111, 1114, 1116, 1117, 1125, 1133, 1153, 1169, 1177, 1181, 1182, 1187, 1196, 1200, 1214, 1222, 1267, 1276, 1277, 1285, 1286, 1289, 1290, 1291, 1303, 1367, 1389, 1393, 1398-1401, 1406, 1407, 1408, 1411, 1419-1422, 1426, 1430, 1431, 1432, 1434-1437, 1439, 1440, 1443, 1444, 1451, 1452, 1471, 1516, 1527, 1535, 1537, 1538, 1539, 1540, 1541, 1563, 1564, 1567, 1568, 1616, 1617, 1623, 1629, 1664, 1665, 1666, 1679, 1687, 1734, 1804, 1876, 1886, 1915, 2008, 2018, 2100, 2101, 2115, and 2116. In certain embodiments, the modified oligonucleotide achieves at least 80% mRNA inhibition of PKK.

[0190] Certain embodiments provide compounds, comprising a modified oligonucleotide and a conjugate group, wherein the modified oligonucleotide consists of 12 to 30 linked nucleosides and has a nucleobase sequence comprising at least 8, at least 9, at least 10, at least 11, at least 12, at least 13, at least 14, at least 15, or at least 16 consecutive nucleobases of any of the nucleobase sequences of SEQ ID NOs: 62, 72, 103, 213, 334-339, 344, 346, 348, 349, 351, 381, 382, 383, 385, 389, 390, 391, 446, 448, 452, 453, 454, 466-473, 476, 481, 484, 491, 492, 494, 495, 497, 504, 526, 558, 559, 566, 568-571, 576, 578, 587, 595, 597, 598, 600-604, 607, 610, 613, 618, 619, 624, 635, 638, 639, 645, 652, 656, 657, 658, 660, 674, 675, 676, 684, 698, 704, 705, 707, 713, 716, 768, 876, 880, 901-905, 908-911, 922, 923, 924, 931, 942, 951, 954-957, 972, 974, 978, 979, 987, 988, 990, 1005, 1019, 1020, 1021, 1025, 1032, 1037, 1040, 1041, 1045, 1054, 1059, 1060, 1061, 1064, 1065, 1066, 1075, 1111, 1116, 1117, 1125, 1133, 1153, 1169, 1177, 1200, 1222, 1267, 1285, 1290, 1291, 1303, 1367, 1398, 1399, 1401, 1406, 1408, 1411, 1419, 1420, 1421, 1426, 1430, 1431, 1432, 1434-1437, 1440, 1443, 1444, 1451, 1537-1540, 1563, 1616, 1679, 1687, 1804, 2008, 2101, 2115, and 2116. In certain embodiments, the modified oligonucleotide achieves at least 85% mRNA inhibition of PKK.

[0191] Certain embodiments provide compounds, comprising a modified oligonucleotide and a conjugate group, wherein the modified oligonucleotide consists of 12 to 30 linked nucleosides and has a nucleobase sequence comprising at least 8, at least 9, at least 10, at least 11, at least 12, at least 13, at least 14, at least 15, or at least 16 consecutive nucleobases of any of the nucleobase sequences of SEQ ID NOs: 334, 346, 351, 382, 390, 391, 446, 448, 452, 453, 468, 469, 470, 471, 472, 476, 481, 491, 495, 504, 558, 566, 568, 570, 571, 578, 587, 597, 598, 600, 604, 613, 635, 638, 645, 656, 658, 660, 674, 675, 684, 704, 705, 880, 901-905, 909, 922, 931, 951, 954, 956, 990, 1005, 1020, 1032, 1037, 1040, 1041, 1045, 1054, 1075, 1111, 1125, 1133, 1153, 1200, 1267, 1291, 1303, 1398, 1399, 1401, 1406, 1420, 1426, 1430, 1431, 1434, 1435, 1436, 1440, 1443, 1451, 1537-1540, 2115, and 2116. In certain embodiments, the modified oligonucleotide achieves at least 90% mRNA inhibition of PKK.

[0192] Certain embodiments provide compounds, comprising a modified oligonucleotide and a conjugate group, wherein the modified oligonucleotide consists of 12 to 30 linked nucleosides and has a nucleobase sequence comprising at least 8, at least 9, at least 10, at least 11, at least 12, at least 13, at least 14, at least 15, or at least 16 consecutive nucleobases of any of the nucleobase sequences of SEQ ID NOs: 334, 391, 448, 468, 469, 568, 570, 598, 635, 658, 674, 684, 705, 901, 903, 904, 922, 990, 1267, 1291, 1420, 1430, 1431, 1434, 1435, 1436, 1537, 1538, and 1540. In certain embodiments, the modified oligonucleotide achieves at least 95% mRNA inhibition of PKK.

[0193] Certain embodiments provide compounds, comprising a modified oligonucleotide and a conjugate group, wherein the modified oligonucleotide consists of 12 to 30 linked nucleosides and has a nucleobase sequence comprising at least 8, at least 9, at least 10, at least 11, at least 12, at least 13, at least 14, at least 15, or at least 16 consecutive nucleobases of any of the nucleobase sequences of SEQ ID NOs: 334, 338, 346, 349, 382, 383, 390, 448, 452, 453, 454, 495, 526, 559, 570, 587, 598, 635, 660, 705, 901, 903, 904, 908, 923, 931, 955, 974, 988, 990, 1020, 1039, 1040, 1111, 1117, 1267, 1291, 1349, 1352, 1367, 1389, 1393, 1399, 1401, 1408, 1411, 1426, 1499, 1516, 1535, 1544, 1548, 1563, 1564, 1568, 1569, 1598, 1616, 1617, 1623, 1624, 1643, 1661, 1665, 1666, 1673, 1679, 1695, 1720, 1804, 1817, 1876, 1881, 1886, 1940, 1947, 2008, 2018, 2019, 2031, 2044, 2100, 2101, 2115, and 2116. In certain embodiments, the modified oligonucleotide achieves an IC₅₀ (μM) of 0.4 or less.

[0194] Certain embodiments provide compounds, comprising a modified oligonucleotide and a conjugate group, wherein the modified oligonucleotide consists of 12 to 30 linked nucleosides and has a nucleobase sequence comprising at least 8, at least 9, at least 10, at least 11, at least 12, at least 13, at least 14, at least 15, or at least 16 consecutive nucleobases of any of the nucleobase sequences of SEQ ID NOs: 334, 346, 349, 382, 453, 454, 495, 526, 570, 587, 598, 635, 660, 901, 903, 904, 931, 955, 990, 1020, 1111, 1267, 1349, 1352, 1367, 1389, 1399, 1408, 1411, 1426, 1516, 1535, 1544, 1548, 1563, 1564, 1568, 1569, 1598, 1616, 1617, 1623, 1643, 1661, 1665, 1666, 1673, 1695, 1804, 1876, 1881, 2019, 2044, 2100, 2101, 2115, and 2116. In certain embodiments, the modified oligonucleotide achieves an IC₅₀ (μM) of 0.3 or less.

[0195] Certain embodiments provide compounds, comprising a modified oligonucleotide and a conjugate group, wherein the modified oligonucleotide consists of 12 to 30 linked nucleosides and has a nucleobase sequence comprising at least 8, at least 9, at least 10, at least 11, at least 12, at least 13, at least 14, at least 15, or at least 16 consecutive nucleobases of any of the nucleobase sequences of SEQ ID NOs: 334, 346, 382, 453, 495, 526, 570, 587, 598, 635, 901, 904, 931, 955, 1020, 1111, 1349, 1352, 1389, 1426, 1516, 1535, 1544, 1548, 1564, 1569, 1598, 1616, 1617, 1665, 1666, 1804, 1876, 1881, 2019, 2044, 2101, and 2116. In certain embodiments, the modified oligonucleotide achieves an IC₅₀ (μM) of 0.2 or less.

[0196] Certain embodiments provide compounds, comprising a modified oligonucleotide and a conjugate group, wherein the modified oligonucleotide consists of 12 to 30 linked nucleosides and has a nucleobase sequence comprising at least 8, at least 9, at least 10, at least 11, at least 12, at least 13, at least 14, at least 15, or at least 16 consecutive nucleobases of any of the nucleobase sequences of SEQ ID NOs: 334, 495, 587, 598,635, 1349, 1352, 1389, 1516, 1544, 1548, 1569, 1598, 1617, 1665, 1666, 1804, 1881, and 2019. In certain embodiments, the modified oligonucleotide achieves an IC₅₀ (μM) of less than 0.2.

[0197] Certain embodiments provide compounds, comprising a modified oligonucleotide and a conjugate group, wherein the modified oligonucleotide consists of 12 to 30 linked nucleosides and comprises a nucleobase sequence comprising at least 8, at least 9, at least 10, at least 11, at least 12, at least 13, at least 14, at least 15, at least 16, at least 17, at least 18, at least 19, or at least 20 consecutive nucleobases complementary to an equal length portion of nucleobases 27427-27466 of SEQ ID NO: 10.

[0198] Certain embodiments provide compounds, comprising a modified oligonucleotide and a conjugate group, wherein the modified oligonucleotide consists of 12 to 30 linked nucleosides and comprises a nucleobase sequence comprising at least 8, at least 9, at least 10, at least 11, at least 12, at least 13, at least 14, at least 15, at least 16, at least 17, at least 18, at least 19, or at least 20 consecutive nucleobases complementary to an equal length portion of nucleobases 33183-33242 of SEQ ID NO: 10.

[0199] Certain embodiments provide compounds, comprising a modified oligonucleotide and a conjugate group, wherein the modified oligonucleotide consists of 12 to 30 linked nucleosides and comprises a nucleobase sequence comprising at least 8, at least 9, at least 10, at least 11, at least 12, at least 13, at least 14, at least 15, at least 16, at least 17, at least 18, at least 19, or at least 20 consecutive nucleobases complementary to an equal length portion of nucleobases 30570-30610 of SEQ ID NO: 10.

[0200] Certain embodiments provide compounds, comprising a modified oligonucleotide and a conjugate group, wherein the modified oligonucleotide consists of 12 to 30 linked nucleosides and comprises a nucleobase sequence comprising at least 8, at least 9, at least 10, at least 11, at least 12, at least 13, at least 14, at least 15, at least 16, at least 17, at least 18, at least 19, or at least 20 consecutive nucleobases complementary to an equal length portion of nucleobases 27427-27520 of SEQ ID NO: 10.

[0201] Certain embodiments provide compounds, comprising a modified oligonucleotide and a conjugate group, wherein the modified oligonucleotide consists of 12 to 30 linked nucleosides and comprises a nucleobase sequence comprising at least 8, at least 9, at least 10, at least 11, at least 12, at least 13, at least 14, at least 15, at least 16, at least 17, at least 18, at least 19, or at least 20 consecutive nucleobases complementary to an equal length portion of nucleobases 33085-33247 of SEQ ID NO: 10.

[0202] Certain embodiments provide compounds, comprising a modified oligonucleotide and a conjugate group, wherein the modified oligonucleotide consists of 12 to 30 linked nucleosides and comprises a nucleobase sequence comprising at least 8, at least 9, at least 10, at least 11, at least 12, at least 13, at least 14, at least 15, at least 16, at least 17, at least 18, at least 19, or at least 20 consecutive nucleobases complementary to an equal length portion of nucleobases 30475-30639 of SEQ ID NO: 10.

[0203] Certain embodiments provide compounds, comprising a modified oligonucleotide and a conjugate group, wherein the modified oligonucleotide consists of 12 to 30 linked nucleosides and comprises a nucleobase sequence comprising at least 8, at least 9, at least 10, at least 11, at least 12, at least 13, at least 14, at least 15, at least 16, at least 17, at least 18, at least 19, or at least 20 consecutive nucleobases complementary to an equal length portion of nucleobases 27362-27524 of SEQ ID NO: 10.

[0204] Certain embodiments provide compounds, comprising a modified oligonucleotide and a conjugate group, wherein the modified oligonucleotide consists of 12 to 30 linked nucleosides and comprises a nucleobase sequence comprising at least 8, at least 9, at least 10, at least 11, at least 12, at least 13, at least 14, at least 15, at least 16, at least 17, at least 18, at least 19, or at least 20 consecutive nucleobases complementary to an equal length portion of nucleobases 33101-33240 of SEQ ID NO: 10.

[0205] Certain embodiments provide compounds, comprising a modified oligonucleotide and a conjugate group, wherein the modified oligonucleotide consists of 12 to 30 linked nucleosides and comprises a nucleobase sequence comprising at least 8, at least 9, at least 10, at least 11, at least 12, at least 13, at least 14, at least 15, at least 16, at least 17, at least 18, at least 19, or at least 20 consecutive nucleobases complementary to an equal length portion of nucleobases 30463-30638 of SEQ ID NO: 10.

[0206] Certain embodiments provide compounds, comprising a modified oligonucleotide and a conjugate group, wherein the modified oligonucleotide consists of 12 to 30 linked nucleosides and comprises a nucleobase sequence comprising at least 8, at least 9, at least 10, at least 11, at least 12, at least 13, at least 14, at least 15, at least 16, at least 17, at least 18, at least 19, or at least 20 consecutive nucleobases complementary to an equal length portion of exon 9, exon 12, or exon 14 of a PKK nucleic acid.

[0207] In certain embodiments the nucleobase sequence of the modified oligonucleotide is at least 80%, at least 81%, at least 82%, at least 83%, at least 84%, at least 85%, at least 86%, at least 87%, at least 88%, at least 89%, at least 90%, at least 91%, at least 92%, at least 93%, at least 94%, at least 95%, at least 96%, at least 97%, at least 98%, at least 99%, or 100% complementary to SEQ ID NO: 10.

[0208] In certain embodiments, the compound consists of a single-stranded modified oligonucleotide.

[0209] In certain embodiments, at least one internucleoside linkage of the modified oligonucleotide is a modified internucleoside linkage.

[0210] In certain embodiments, at least one modified internucleoside linkage of the modified oligonucleotide is a phosphorothioate internucleoside linkage.

[0211] In certain embodiments, the modified oligonucleotide comprises at least 1, 2, 3, 4, 5, 6, or 7 phosphodiester internucleoside linkages.

[0212] In certain embodiments, each internucleoside linkage of the modified oligonucleotide is selected from a phosphodiester internucleoside linkage and a phosphorothioate internucleoside linkage.

[0213] In certain embodiments, each internucleoside linkage of the modified oligonucleotide is a phosphorothioate linkage.

[0214] In certain embodiments, at least one nucleoside of the modified oligonucleotide comprises a modified nucleobase.

[0215] In certain embodiments, the modified nucleobase is a 5-methylcytosine.

[0216] In certain embodiments, the modified oligonucleotide comprises at least one modified sugar.

[0217] In certain embodiments, the modified sugar is a 2′ modified sugar, a BNA, or a THP.

[0218] In certain embodiments, the modified sugar is any of a 2′-O-methoxyethyl, 2′-O-methyl, a constrained ethyl, a LNA, or a 3′-fluoro-HNA.

[0219] In certain embodiments, the compound comprises at least one 2′-O-methoxyethyl nucleoside, 2′-O-methyl nucleoside, constrained ethyl nucleoside, LNA nucleoside, or 3′-fluoro-HNA nucleoside.

[0220] In certain embodiments, the modified oligonucleotide comprises:
[0221] a gap segment consisting of 10 linked deoxynucleosides;
[0222] a 5′ wing segment consisting of 5 linked nucleosides; and
[0223] a 3′ wing segment consisting of 5 linked nucleosides;
[0224] wherein the gap segment is positioned between the 5′ wing segment and the 3′ wing segment and wherein each nucleoside of each wing segment comprises a modified sugar.

[0225] In certain embodiments, the modified oligonucleotide consists of 20 linked nucleosides.

[0226] In certain embodiments, the modified oligonucleotide consists of 19 linked nucleosides.

[0227] In certain embodiments, the modified oligonucleotide consists of 18 linked nucleosides.

[0228] Certain embodiments provide compounds consisting of a conjugate group and a modified oligonucleotide according to the following formula: Tes Ges mCes Aes Aes Gds Tds mCds Tds mCds Tds Tds Gds Gds mCds Aes Aes Aes mCes Ae; wherein,
[0229] A=an adenine,
[0230] mC=a 5′-methylcytosine
[0231] G=a guanine,
[0232] T=a thymine,
[0233] e=a 2′-O-methoxyethyl modified nucleoside,
[0234] d=a 2′-deoxynucleoside, and
[0235] s=a phosphorothioate internucleoside linkage.

[0236] Certain embodiments provide compounds consisting of a conjugate group and a modified oligonucleotide according to the following formula: mCes mCes mCes mCes mCes Tds Tds mCds Tds Tds Tds Ads Tds Ads Gds mCes mCes Aes Ges mCe; wherein,
[0237] A=an adenine,
[0238] mC=a 5′-methylcytosine;
[0239] G=a guanine,
[0240] T=a thymine,
[0241] e=a 2′-O-methoxyethyl modified nucleoside,
[0242] d=a 2′-deoxynucleoside, and
[0243] s=a phosphorothioate internucleoside linkage.

[0244] Certain embodiments provide compounds consisting of a conjugate group and a modified oligonucleotide according to the following formula: mCes Ges Aks Tds Ads Tds mCds Ads Tds Gds Ads Tds Tds mCks mCks mCe; wherein,
[0245] A=an adenine,
[0246] mC=a 5′-methylcytosine;
[0247] G=a guanine,
[0248] T=a thymine,
[0249] e=a 2′-O-methoxyethyl modified nucleoside,
[0250] k=a cEt modified nucleoside,
[0251] d=a 2′-deoxynucleoside, and
[0252] s=a phosphorothioate internucleoside linkage.

[0253] In certain embodiments, the conjugate group is linked to the modified oligonucleotide at the 5′ end of the modified oligonucleotide. In certain embodiments, the conjugate group is linked to the modified oligonucleotide at the 3′ end of the modified oligonucleotide. In certain embodiments, the conjugate group comprises at least one N-Acetylgalactosamine (GalNAc), at least two N-Acetylgalactosamines (GalNAcs), or at least three N-Acetylgalactosamines (GalNAcs).

[0254] Certain embodiments provide compounds according to the following formula:

[chemical structure]

[0255] Certain embodiments provide compounds according to the following formula:

[chemical structure]

[0256] Certain embodiments provide compounds according to the following formula:

[chemical structure]

[0257] In certain embodiments, a compound can comprise or consist of any modified oligonucleotide described herein and a conjugate group. In certain embodiments, a compound can comprise or consist of a modified oligonucleotide consisting of 12 to 30 linked nucleosides and having a nucleobase sequence comprising at least 8, at least 9, at least 10, at least 11, at least 12, at least 13, at least 14, at least 15, at least 16, at least 17, at least 18, at least 19, or at least 20 consecutive nucleobases of any of the nucleobase sequences of SEQ ID NOs: 30-2226, and a conjugate group.

[0258] In certain embodiments, a compound having the following chemical structure comprises or consists of ISIS 721744 with a 5′-X, wherein X is a conjugate group comprising GalNAc as described herein:

[chemical structure]

[0259] In certain embodiments, a compound having the following chemical structure comprises or consists of ISIS 546254 with a 5′-X, wherein X is a conjugate group comprising GalNAc as described herein:

[chemical structure]

[0260] Certain embodiments provide a compound comprising or consisting of the following formula:

[chemical structure]

[0261] Certain embodiments provide a compound comprising or consisting of the following formula:

[chemical structure]

[0262] Certain embodiments provide a compound comprising or consisting of the following formula:

[chemical structure]

[0263] wherein either R¹ is —OCH₂CH₂OCH₃ (MOE) and R² is H; or R¹ and R² together form a bridge, wherein R¹ is —O— and R² is —CH₂—, —CH(CH₃)—, or —CH₂CH₂—, and R¹ and R² are directly connected such that the resulting bridge is selected from: —O—CH₂—, —O—CH(CH₃)—, and —O—CH₂CH₂—;
[0264] and for each pair of R₃ and R⁴ on the same ring, independently for each ring: either R₃ is selected from H and —OCH₂CH₂OCH₃ and R⁴ is H; or R₃ and R⁴ together form a bridge, wherein R₃ is —O—, and R⁴ is —CH₂—, —CH(CH₃)—, or —CH₂CH₂— and R₃ and R⁴ are directly connected such that the resulting bridge is selected from: —O—CH₂—, —O—CH(CH₃)—, and —O—CH₂CH₂—;
[0265] and R⁵ is selected from H and —CH₃;
[0266] and Z is selected from S⁻ and O⁻.

[0267] Certain embodiments provide compositions comprising the compound of any preceding claim or salt thereof and at least one of a pharmaceutically acceptable carrier or diluent.

[0268] Certain embodiments provide methods comprising administering to an animal the compound or composition of any preceding claim.

[0269] In certain embodiments, the animal is a human.

[0270] In certain embodiments, administering the compound prevents, treats, or ameliorates a PKK associated disease, disorder or condition.

[0271] In certain embodiments, the PKK associated disease, disorder or condition is a hereditary angioedema (HAE), edema, angioedema, swelling, angioedema of the lids, ocular edema, macular edema, cerebral edema, thrombosis, embolism, thromboembolism, deep vein thrombosis, pulmonary embolism, myocardial infarction, stroke, or infarct.

[0272] Certain embodiments provide use of the compound or composition of any preceding claim for the manufacture of a medicament for treating an inflammatory disease or a thromboembolic disease.

### Antisense Compounds

[0273] Oligomeric compounds include, but are not limited to, oligonucleotides, oligonucleosides, oligonucleotide analogs, oligonucleotide mimetics, antisense compounds, antisense oligonucleotides, and siRNAs. An oligomeric compound may be “antisense” to a target nucleic acid, meaning that is is capable of undergoing hybridization to a target nucleic acid through hydrogen bonding.

[0274] In certain embodiments, an antisense compound has a nucleobase sequence that, when written in the 5′ to 3′ direction, comprises the reverse complement of the target segment of a target nucleic acid to which it is targeted. In certain such embodiments, an antisense oligonucleotide has a nucleobase sequence that, when written in the 5′ to 3′ direction, comprises the reverse complement of the target segment of a target nucleic acid to which it is targeted.

[0275] In certain embodiments, an antisense compound targeted to a PKK nucleic acid is 12 to 30 subunits in length. In certain embodiments, an antisense compound targeted to PKK nucleic acid is 12 to 25 subunits in length. In certain embodiments, an antisense compound targeted to PKK nucleic acid is 12 to 22 subunits in length. In certain embodiments, an antisense compound targeted to PKK nucleic acid is 14 to 20 subunits in length. In certain embodiments, an antisense compound targeted to PKK nucleic acid is 15 to 25 subunits in length. In certain embodiments, an antisense compound targeted to PKK nucleic acid is 18 to 22 subunits in length. In certain embodiments, an antisense compound targeted to PKK nucleic acid is 19 to 21 subunits in length. In certain embodiments, the antisense compound is 8 to 80, 12 to 50, 13 to 30, 13 to 50, 14 to 30, 14 to 50, 15 to 30, 15 to 50, 16 to 30, 16 to 50, 17 to 30, 17 to 50, 18 to 30, 18 to 50, 19 to 30, 19 to 50, or 20 to 30 linked subunits in length.

[0276] In certain embodiments, an antisense compound targeted to a PKK nucleic acid is 12 subunits in length. In certain embodiments, an antisense compound targeted to a PKK nucleic acid is 13 subunits in length. In certain embodiments, an antisense compound targeted to a PKK nucleic acid is 14 subunits in length. In certain embodiments, an antisense compound targeted to a PKK nucleic acid is 15 subunits in length. In certain embodiments, an antisense compound targeted to a PKK nucleic acid is 16 subunits in length. In certain embodiments, an antisense compound targeted to a PKK nucleic acid is 17 subunits in length. In certain embodiments, an antisense compound targeted to a PKK nucleic acid is 18 subunits in length. In certain embodiments, an antisense compound targeted to a PKK nucleic acid is 19 subunits in length. In certain embodiments, an antisense compound targeted to a PKK nucleic acid is 20 subunits in length. In certain embodiments, an antisense compound targeted to a PKK nucleic acid is 21 subunits in length. In certain embodiments, an antisense compound targeted to a PKK nucleic acid is 22 subunits in length. In certain embodiments, an antisense compound targeted to a PKK nucleic acid is 23 subunits in length. In certain embodiments, an antisense compound targeted to a PKK nucleic acid is 24 subunits in length. In certain embodiments, an antisense compound targeted to a PKK nucleic acid is 25 subunits in length. In certain embodiments, an antisense compound targeted to a PKK nucleic acid is 26 subunits in length. In certain embodiments, an antisense compound targeted to a PKK nucleic acid is 27 subunits in length. In certain embodiments, an antisense compound targeted to a PKK nucleic acid is 28 subunits in length. In certain embodiments, an antisense compound targeted to a PKK nucleic acid is 29 subunits in length. In certain embodiments, an antisense compound targeted to a PKK nucleic acid is 30 subunits in length. In certain embodiments, the antisense compound targeted to a PKK nucleic acid is 31, 32, 33, 34, 35, 36, 37, 38, 39, 40, 41, 42, 43, 44, 45, 46, 47, 48, 49, 50, 51, 52, 53, 54, 55, 56, 57, 58, 59, 60, 61, 62, 63, 64, 65, 66, 67, 68, 69, 70, 71, 72, 73, 74, 75, 76, 77, 78, 79, or 80 linked subunits in length, or a range defined by any two of the above values. In certain embodiments the antisense compound is an antisense oligonucleotide, and the linked subunits are nucleosides.

[0277] In certain embodiments antisense oligonucleotides targeted to a PKK nucleic acid may be shortened or truncated. For example, a single subunit may be deleted from the 5′ end (5′ truncation), or alternatively from the 3′ end (3′ truncation). A shortened or truncated antisense compound targeted to a PKK nucleic acid may have two subunits deleted from the 5′ end, or alternatively may have two subunits deleted from the 3′ end, of the antisense compound. Alternatively, the deleted nucleosides may be dispersed throughout the antisense compound, for example, in an antisense compound having one nucleoside deleted from the 5′ end and one nucleoside deleted from the 3′ end.

[0278] When a single additional subunit is present in a lengthened antisense compound, the additional subunit may be located at the 5′ or 3′ end of the antisense compound. When two or more additional subunits are present, the added subunits may be adjacent to each other, for example, in an antisense compound having two subunits added to the 5′ end (5′ addition), or alternatively to the 3′ end (3′ addition), of the antisense compound. Alternatively, the added subunits may be dispersed throughout the antisense compound, for example, in an antisense compound having one subunit added to the 5′ end and one subunit added to the 3′ end.

[0279] It is possible to increase or decrease the length of an antisense compound, such as an antisense oligonucleotide, and/or introduce mismatch bases without eliminating activity. For example, in Woolf et al. (Proc. Natl. Acad. Sci. USA 89:7305-7309, 1992), a series of antisense oligonucleotides 13-25 nucleobases in length were tested for their ability to induce cleavage of a target RNA in an oocyte injection model. Antisense oligonucleotides 25 nucleobases in length with 8 or 11 mismatch bases near the ends of the antisense oligonucleotides were able to direct specific cleavage of the target mRNA, albeit to a lesser extent than the antisense oligonucleotides that contained no mismatches. Similarly, target specific cleavage was achieved using 13 nucleobase antisense oligonucleotides, including those with 1 or 3 mismatches.

[0280] Gautschi et al (J. Natl. Cancer Inst. 93:463-471, March 2001) demonstrated the ability of an oligonucleotide having 100% complementarity to the bcl-2 mRNA and having 3 mismatches to the bcl-xL mRNA to reduce the expression of both bcl-2 and bcl-xL in vitro and in vivo. Furthermore, this oligonucleotide demonstrated potent anti-tumor activity in vivo.

[0281] Maher and Dolnick (Nuc. Acid. Res. 16:3341-3358, 1988) tested a series of tandem 14 nucleobase antisense oligonucleotides, and a 28 and 42 nucleobase antisense oligonucleotides comprised of the sequence of two or three of the tandem antisense oligonucleotides, respectively, for their ability to arrest translation of human DHFR in a rabbit reticulocyte assay. Each of the three 14 nucleobase antisense oligonucleotides alone was able to inhibit translation, albeit at a more modest level than the 28 or 42 nucleobase antisense oligonucleotides.

### Antisense Compound Motifs

[0282] In certain embodiments, antisense compounds targeted to a PKK nucleic acid have chemically modified subunits arranged in patterns, or motifs, to confer to the antisense compounds properties such as enhanced inhibitory activity, increased binding affinity for a target nucleic acid, or resistance to degradation by in vivo nucleases.

[0283] Chimeric antisense compounds typically contain at least one region modified so as to confer increased resistance to nuclease degradation, increased cellular uptake, increased binding affinity for the target nucleic acid, and/or increased inhibitory activity. A second region of a chimeric antisense compound may optionally serve as a substrate for the cellular endonuclease RNase H, which cleaves the RNA strand of an RNA:DNA duplex.

[0284] Antisense compounds having a gapmer motif are considered chimeric antisense compounds. In a gapmer an internal region having a plurality of nucleotides that supports RNaseH cleavage is positioned between external regions having a plurality of nucleotides that are chemically distinct from the nucleosides of the internal region. In the case of an antisense oligonucleotide having a gapmer motif, the gap segment generally serves as the substrate for endonuclease cleavage, while the wing segments comprise modified nucleosides. In certain embodiments, the regions of a gapmer are differentiated by the types of sugar moieties comprising each distinct region. The types of sugar moieties that are used to differentiate the regions of a gapmer may in some embodiments include β-D-ribonucleosides, β-D-deoxyribonucleosides, 2′-modified nucleosides (such 2′-modified nucleosides may include 2′-MOE, and 2′-O—CH₃, among others), and bicyclic sugar modified nucleosides (such bicyclic sugar modified nucleosides may include those having a 4′-(CH₂)n-O-2′ bridge, where n=1 or n=2 and 4′-CH₂—O—CH₂-2′). In certain embodiments, wings may include several modified sugar moieties, including, for example 2′-MOE. In certain embodiments, wings may include several modified and unmodified sugar moieties. In certain embodiments, wings may include various combinations of 2′-MOE nucleosides and 2′-deoxynucleosides.

[0285] Each distinct region may comprise uniform sugar moieties, variant, or alternating sugar moieties. The wing-gap-wing motif is frequently described as “X—Y—Z”, where “X” represents the length of the 5′ wing, “Y” represents the length of the gap, and “Z” represents the length of the 3′ wing. “X” and “Z” may comprise uniform, variant, or alternating sugar moieties. In certain embodiments, “X” and “Y” may include one or more 2′-deoxynucleosides. “Y” may comprise 2′-deoxynucleosides. As used herein, a gapmer described as “X—Y—Z” has a configuration such that the gap is positioned immediately adjacent to each of the 5′ wing and the 3′ wing. Thus, no intervening nucleotides exist between the 5′ wing and gap, or the gap and the 3′ wing. Any of the antisense compounds described herein can have a gapmer motif. In certain embodiments, “X” and “Z” are the same; in other embodiments they are different.

[0286] In certain embodiments, gapmers provided herein include, for example 20-mers having a motif of 5-10-5.

### Target Nucleic Acids, Target Regions and Nucleotide Sequences

[0287] Nucleotide sequences that encode human plasma prekallikrein (PKK) include, without limitation, the following: GENBANK Accession No. NM_000892.3 (incorporated herein as SEQ ID NO: 1), GENBANK Accession No. DC412984.1 (incorporated herein as SEQ ID NO: 2), GENBANK Accession No. CN265612.1 (incorporated herein as SEQ ID NO: 3), GENBANK Accession No. AK297672.1 (incorporated herein as SEQ ID NO: 4), GENBANK Accession No. DC413312.1 (incorporated herein as SEQ ID NO: 5), GENBANK Accession No. AV688858.2 (incorporated herein as SEQ ID NO: 6), GENBANK Accession No. CD652077.1 (incorporated herein as SEQ ID NO: 7), GENBANK Accession No. BC143911.1 (incorporated herein as SEQ ID NO: 8), GENBANK Accession No. CB162532.1 (incorporated herein as SEQ ID NO: 9), GENBANK Accession No. NT_016354.19 truncated from nucleobases 111693001 to 111730000 (incorporated herein as SEQ ID NO: 10), GENBANK Accession No. NM_008455.2 (incorporated herein as SEQ ID NO: 11), GENBANK Accession No. BB598673.1 (incorporated herein as SEQ ID NO: 12), GENBANK Accession No. NT_039460.7 truncated from nucleobases 6114001 to U.S. Pat. No. 6,144,000 (incorporated herein as SEQ ID NO: 13), GENBANK Accession No. NM_012725.2 (incorporated herein as SEQ ID NO: 14), GENBANK Accession No. NW_047473.1 truncated from nucleobases 10952001 to 10982000 (incorporated herein as SEQ ID NO: 15), GENBANK Accession No. XM_002804276.1 (incorporated herein as SEQ ID NO: 17), and GENBANK Accession No. NW_001118167.1 truncated from nucleobases 2358000 to U.S. Pat. No. 2,391,000 (incorporated herein as SEQ ID NO: 18).

[0288] It is understood that the sequence set forth in each SEQ ID NO in the Examples contained herein is independent of any modification to a sugar moiety, an internucleoside linkage, or a nucleobase. As such, antisense compounds defined by a SEQ ID NO may comprise, independently, one or more modifications to a sugar moiety, an internucleoside linkage, or a nucleobase. Antisense compounds described by Isis Number (Isis No) indicate a combination of nucleobase sequence and motif.

[0289] In certain embodiments, a target region is a structurally defined region of the target nucleic acid. For example, a target region may encompass a 3′ UTR, a 5′ UTR, an exon, an intron, an exon/intron junction, a coding region, a translation initiation region, translation termination region, or other defined nucleic acid region. The structurally defined regions for PKK can be obtained by accession number from sequence databases such as NCBI and such information is incorporated herein by reference. In certain embodiments, a target region may encompass the sequence from a 5′ target site of one target segment within the target region to a 3′ target site of another target segment within the same target region.

[0290] Targeting includes determination of at least one target segment to which an antisense compound hybridizes, such that a desired effect occurs. In certain embodiments, the desired effect is a reduction in mRNA target nucleic acid levels. In certain embodiments, the desired effect is reduction of levels of protein encoded by the target nucleic acid or a phenotypic change associated with the target nucleic acid.

[0291] A target region may contain one or more target segments. Multiple target segments within a target region may be overlapping. Alternatively, they may be non-overlapping. In certain embodiments, target segments within a target region are separated by no more than about 300 nucleotides. In certain embodiments, target segments within a target region are separated by a number of nucleotides that is, is about, is no more than, is no more than about, 250, 200, 150, 100, 90, 80, 70, 60, 50, 40, 30, 20, or 10 nucleotides on the target nucleic acid, or is a range defined by any two of the preceeding values. In certain embodiments, target segments within a target region are separated by no more than, or no more than about, 5 nucleotides on the target nucleic acid. In certain embodiments, target segments are contiguous. Contemplated are target regions defined by a range having a starting nucleic acid that is any of the 5′ target sites or 3′ target sites listed herein.

[0292] Suitable target segments may be found within a 5′ UTR, a coding region, a 3′ UTR, an intron, an exon, or an exon/intron junction. Target segments containing a start codon or a stop codon are also suitable target segments. A suitable target segment may specifically exclude a certain structurally defined region such as the start codon or stop codon.

[0293] The determination of suitable target segments may include a comparison of the sequence of a target nucleic acid to other sequences throughout the genome. For example, the BLAST algorithm may be used to identify regions of similarity amongst different nucleic acids. This comparison can prevent the selection of antisense compound sequences that may hybridize in a non-specific manner to sequences other than a selected target nucleic acid (i.e., non-target or off-target sequences).

[0294] There may be variation in activity (e.g., as defined by percent reduction of target nucleic acid levels) of the antisense compounds within an active target region. In certain embodiments, reductions in PKK mRNA levels are indicative of inhibition of PKK expression. Reductions in levels of a PKK protein are also indicative of inhibition of target mRNA expression. Further, phenotypic changes are indicative of inhibition of PKK expression. For example, reduced or prevented inflammation can be indicative of inhibition of PKK expression. In another example, reduced or prevented edema/swelling can be indicative of inhibition of PKK expression. In another example, reduced or prevented vascular permeability can be indicative of inhibition of PKK expression. In another example, reduced or prevented vascular leakage can be indicative of inhibition of PKK expression. In certain embodiments, vascular permeability is measured by quantification of a dye, such as Evans Blue.

### Hybridization

[0295] In some embodiments, hybridization occurs between an antisense compound disclosed herein and a target nucleic acid. The most common mechanism of hybridization involves hydrogen bonding (e.g., Watson-Crick, Hoogsteen or reversed Hoogsteen hydrogen bonding) between complementary nucleobases of the nucleic acid molecules.

[0296] Hybridization can occur under varying conditions. Stringent conditions are sequence-dependent and are determined by the nature and composition of the nucleic acid molecules to be hybridized.

[0297] Methods of determining whether a sequence is specifically hybridizable to a target nucleic acid are well known in the art. In certain embodiments, the antisense compounds provided herein are specifically hybridizable with a target nucleic acid.

### Complementarity

[0298] An antisense compound and a target nucleic acid are complementary to each other when a sufficient number of nucleobases of the antisense compound can hydrogen bond with the corresponding nucleobases of the target nucleic acid, such that a desired effect will occur (e.g., antisense inhibition of a target nucleic acid, such as a PKK nucleic acid).

[0299] Non-complementary nucleobases between an antisense compound and a PKK nucleic acid may be tolerated provided that the antisense compound remains able to specifically hybridize to a target nucleic acid. Moreover, an antisense compound may hybridize over one or more segments of a PKK nucleic acid such that intervening or adjacent segments are not involved in the hybridization event (e.g., a loop structure, mismatch or hairpin structure).

[0300] In certain embodiments, the antisense compounds provided herein, or a specified portion thereof, are, or are at least, 70%, 80%, 81%, 82%, 83%, 84%, 85%, 86%, 87%, 88%, 89%, 90%, 91%, 92%, 93%, 94%, 95%, 96%, 97%, 98%, 99%, or 100% complementary to an PKK nucleic acid, a target region, target segment, or specified portion thereof. Percent complementarity of an antisense compound with a target nucleic acid can be determined using routine methods.

[0301] For example, an antisense compound in which 18 of 20 nucleobases of the antisense compound are complementary to a target region, and would therefore specifically hybridize, would represent 90 percent complementarity. In this example, the remaining noncomplementary nucleobases may be clustered or interspersed with complementary nucleobases and need not be contiguous to each other or to complementary nucleobases. As such, an antisense compound which is 18 nucleobases in length having four noncomplementary nucleobases which are flanked by two regions of complete complementarity with the target nucleic acid would have 77.8% overall complementarity with the target nucleic acid and would thus fall within the scope of the present invention. Percent complementarity of an antisense compound with a region of a target nucleic acid can be determined routinely using BLAST programs (basic local alignment search tools) and PowerBLAST programs known in the art (Altschul et al., J. Mol. Biol., 1990, 215, 403 410; Zhang and Madden, Genome Res., 1997, 7, 649 656). Percent homology, sequence identity or complementarity, can be determined by, for example, the Gap program (Wisconsin Sequence Analysis Package, Version 8 for Unix, Genetics Computer Group, University Research Park, Madison Wis.), using default settings, which uses the algorithm of Smith and Waterman (Adv. Appl. Math., 1981, 2, 482 489).

[0302] In certain embodiments, the antisense compounds provided herein, or specified portions thereof, are fully complementary (i.e. 100% complementary) to a target nucleic acid, or specified portion thereof. For example, an antisense compound may be fully complementary to a plasma prekallikrein nucleic acid, or a target region, or a target segment or target sequence thereof. As used herein, “fully complementary” means each nucleobase of an antisense compound is capable of precise base pairing with the corresponding nucleobases of a target nucleic acid. For example, a 20 nucleobase antisense compound is fully complementary to a target sequence that is 400 nucleobases long, so long as there is a corresponding 20 nucleobase portion of the target nucleic acid that is fully complementary to the antisense compound. Fully complementary can also be used in reference to a specified portion of the first and/or the second nucleic acid. For example, a 20 nucleobase portion of a 30 nucleobase antisense compound can be “fully complementary” to a target sequence that is 400 nucleobases long. The 20 nucleobase portion of the 30 nucleobase oligonucleotide is fully complementary to the target sequence if the target sequence has a corresponding 20 nucleobase portion wherein each nucleobase is complementary to the 20 nucleobase portion of the antisense compound. At the same time, the entire 30 nucleobase antisense compound may or may not be fully complementary to the target sequence, depending on whether the remaining 10 nucleobases of the antisense compound are also complementary to the target sequence.

[0303] The location of a non-complementary nucleobase may be at the 5′ end or 3′ end of the antisense compound. Alternatively, the non-complementary nucleobase or nucleobases may be at an internal position of the antisense compound. When two or more non-complementary nucleobases are present, they may be contiguous (i.e. linked) or non-contiguous. In one embodiment, a non-complementary nucleobase is located in the wing segment of a gapmer antisense oligonucleotide.

[0304] In certain embodiments, antisense compounds that are, or are up to 11, 12, 13, 14, 15, 16, 17, 18, 19, or 20 nucleobases in length comprise no more than 4, no more than 3, no more than 2, or no more than 1 non-complementary nucleobase(s) relative to a target nucleic acid or specified portion thereof. In certain embodiments, antisense compounds that are, or are up to 11, 12, 13, 14, 15, 16, 17, 18, 19, 20, 21, 22, 23, 24, 25, 26, 27, 28, 29, or 30 nucleobases in length comprise no more than 6, no more than 5, no more than 4, no more than 3, no more than 2, or no more than 1 non-complementary nucleobase(s) relative to a target nucleic acid or specified portion thereof.

[0305] The antisense compounds provided also include those which are complementary to a portion of a target nucleic acid. As used herein, “portion” refers to a defined number of contiguous (i.e. linked) nucleobases within a region or segment of a target nucleic acid. A “portion” can also refer to a defined number of contiguous nucleobases of an antisense compound. In certain embodiments, the antisense compounds, are complementary to at least an 8 nucleobase portion of a target segment. In certain embodiments, the antisense compounds are complementary to at least a 9 nucleobase portion of a target segment. In certain embodiments, the antisense compounds are complementary to at least a 10 nucleobase portion of a target segment. In certain embodiments, the antisense compounds are complementary to at least an 11 nucleobase portion of a target segment. In certain embodiments, the antisense compounds are complementary to at least a 12 nucleobase portion of a target segment. In certain embodiments, the antisense compounds are complementary to at least a 13 nucleobase portion of a target segment. In certain embodiments, the antisense compounds are complementary to at least a 14 nucleobase portion of a target segment. In certain embodiments, the antisense compounds are complementary to at least a 15 nucleobase portion of a target segment. Also contemplated are antisense compounds that are complementary to at least a 9, 10, 11, 12, 13, 14, 15, 16, 17, 18, 19, 20, or more nucleobase portion of a target segment, or a range defined by any two of these values.

### Identity

[0306] The antisense compounds provided herein may also have a defined percent identity to a particular nucleotide sequence, SEQ ID NO, or compound represented by a specific Isis number, or portion thereof. As used herein, an antisense compound is identical to the sequence disclosed herein if it has the same nucleobase pairing ability. For example, a RNA which contains uracil in place of thymidine in a disclosed DNA sequence would be considered identical to the DNA sequence since both uracil and thymidine pair with adenine. Shortened and lengthened versions of the antisense compounds described herein as well as compounds having non-identical bases relative to the antisense compounds provided herein also are contemplated. The non-identical bases may be adjacent to each other or dispersed throughout the antisense compound. Percent identity of an antisense compound is calculated according to the number of bases that have identical base pairing relative to the sequence to which it is being compared.

[0307] In certain embodiments, the antisense compounds, or portions thereof, are at least 70%, 75%, 80%, 85%, 90%, 95%, 96%, 97%, 98%, 99% or 100% identical to one or more of the antisense compounds or SEQ ID NOs, or a portion thereof, disclosed herein.

[0308] In certain embodiments, a portion of the antisense compound is compared to an equal length portion of the target nucleic acid. In certain embodiments, an 8, 9, 10, 11, 12, 13, 14, 15, 16, 17, 18, 19, 20, 21, 22, 23, 24, or 25 nucleobase portion is compared to an equal length portion of the target nucleic acid.

[0309] In certain embodiments, a portion of the antisense oligonucleotide is compared to an equal length portion of the target nucleic acid. In certain embodiments, an 8, 9, 10, 11, 12, 13, 14, 15, 16, 17, 18, 19, 20, 21, 22, 23, 24, or 25 nucleobase portion is compared to an equal length portion of the target nucleic acid.

### Modifications

[0310] A nucleoside is a base-sugar combination. The nucleobase (also known as base) portion of the nucleoside is normally a heterocyclic base moiety. Nucleotides are nucleosides that further include a phosphate group covalently linked to the sugar portion of the nucleoside. For those nucleosides that include a pentofuranosyl sugar, the phosphate group can be linked to the 2′, 3′ or 5′ hydroxyl moiety of the sugar. Oligonucleotides are formed through the covalent linkage of adjacent nucleosides to one another, to form a linear polymeric oligonucleotide. Within the oligonucleotide structure, the phosphate groups are commonly referred to as forming the internucleoside linkages of the oligonucleotide.

[0311] Modifications to antisense compounds encompass substitutions or changes to internucleoside linkages, sugar moieties, or nucleobases. Modified antisense compounds are often preferred over native forms because of desirable properties such as, for example, enhanced cellular uptake, enhanced affinity for nucleic acid target, increased stability in the presence of nucleases, or increased inhibitory activity.

[0312] Chemically modified nucleosides may also be employed to increase the binding affinity of a shortened or truncated antisense oligonucleotide for its target nucleic acid. Consequently, comparable results can often be obtained with shorter antisense compounds that have such chemically modified nucleosides.

### Modified Internucleoside Linkages

[0313] The naturally occurring internucleoside linkage of RNA and DNA is a 3′ to 5′ phosphodiester linkage. Antisense compounds having one or more modified, i.e. non-naturally occurring, internucleoside linkages are often selected over antisense compounds having naturally occurring internucleoside linkages because of desirable properties such as, for example, enhanced cellular uptake, enhanced affinity for target nucleic acids, and increased stability in the presence of nucleases.

[0314] Oligonucleotides having modified internucleoside linkages include internucleoside linkages that retain a phosphorus atom as well as internucleoside linkages that do not have a phosphorus atom. Representative phosphorus containing internucleoside linkages include, but are not limited to, phosphodiesters, phosphotriesters, methylphosphonates, phosphoramidate, and phosphorothioates. Methods of preparation of phosphorous-containing and non-phosphorous-containing linkages are well known.

[0315] In certain embodiments, antisense compounds targeted to a plasma prekallikrein nucleic acid comprise one or more modified internucleoside linkages. In certain embodiments, the modified internucleoside linkages are phosphorothioate linkages. In certain embodiments, each internucleoside linkage of an antisense compound is a phosphorothioate internucleoside linkage.

[0316] In certain embodiments, oligonucleotides comprise modified internucleoside linkages arranged along the oligonucleotide or region thereof in a defined pattern or modified internucleoside linkage motif. In certain embodiments, internucleoside linkages are arranged in a gapped motif. In such embodiments, the internucleoside linkages in each of two wing regions are different from the internucleoside linkages in the gap region. In certain embodiments the internucleoside linkages in the wings are phosphodiester and the internucleoside linkages in the gap are phosphorothioate. The nucleoside motif is independently selected, so such oligonucleotides having a gapped internucleoside linkage motif may or may not have a gapped nucleoside motif and if it does have a gapped nucleoside motif, the wing and gap lengths may or may not be the same.

[0317] In certain embodiments, oligonucleotides comprise a region having an alternating internucleoside linkage motif. In certain embodiments, oligonucleotides of the present invention comprise a region of uniformly modified internucleoside linkages. In certain such embodiments, the oligonucleotide comprises a region that is uniformly linked by phosphorothioate internucleoside linkages. In certain embodiments, the oligonucleotide is uniformly linked by phosphorothioate. In certain embodiments, each internucleoside linkage of the oligonucleotide is selected from phosphodiester and phosphorothioate. In certain embodiments, each internucleoside linkage of the oligonucleotide is selected from phosphodiester and phosphorothioate and at least one internucleoside linkage is phosphorothioate.

[0318] In certain embodiments, the oligonucleotide comprises at least 6 phosphorothioate internucleoside linkages. In certain embodiments, the oligonucleotide comprises at least 8 phosphorothioate internucleoside linkages. In certain embodiments, the oligonucleotide comprises at least 10 phosphorothioate internucleoside linkages. In certain embodiments, the oligonucleotide comprises at least one block of at least 6 consecutive phosphorothioate internucleoside linkages. In certain embodiments, the oligonucleotide comprises at least one block of at least 8 consecutive phosphorothioate internucleoside linkages. In certain embodiments, the oligonucleotide comprises at least one block of at least 10 consecutive phosphorothioate internucleoside linkages. In certain embodiments, the oligonucleotide comprises at least block of at least one 12 consecutive phosphorothioate internucleoside linkages. In certain such embodiments, at least one such block is located at the 3′ end of the oligonucleotide. In certain such embodiments, at least one such block is located within 3 nucleosides of the 3′ end of the oligonucleotide.

[0319] In certain embodiments, oligonucleotides comprise one or more methylphosponate linkages. In certain embodiments, oligonucleotides having a gapmer nucleoside motif comprise a linkage motif comprising all phosphorothioate linkages except for one or two methylphosponate linkages. In certain embodiments, one methylphosponate linkage is in the central gap of an oligonucleotide having a gapmer nucleoside motif.

[0320] In certain embodiments, it is desirable to arrange the number of phosphorothioate internucleoside linkages and phosphodiester internucleoside linkages to maintain nuclease resistance. In certain embodiments, it is desirable to arrange the number and position of phosphorothioate internucleoside linkages and the number and position of phosphodiester internucleoside linkages to maintain nuclease resistance. In certain embodiments, the number of phosphorothioate internucleoside linkages may be decreased and the number of phosphodiester internucleoside linkages may be increased. In certain embodiments, the number of phosphorothioate internucleoside linkages may be decreased and the number of phosphodiester internucleoside linkages may be increased while still maintaining nuclease resistance. In certain embodiments it is desirable to decrease the number of phosphorothioate internucleoside linkages while retaining nuclease resistance. In certain embodiments it is desirable to increase the number of phosphodiester internucleoside linkages while retaining nuclease resistance.

### Modified Sugar Moieties

[0321] Antisense compounds can optionally contain one or more nucleosides wherein the sugar group has been modified. Such sugar modified nucleosides may impart enhanced nuclease stability, increased binding affinity, or some other beneficial biological property to the antisense compounds. In certain embodiments, nucleosides comprise chemically modified ribofuranose ring moieties. Examples of chemically modified ribofuranose rings include without limitation, addition of substitutent groups (including 5′ and 2′ substituent groups, bridging of non-geminal ring atoms to form bicyclic nucleic acids (BNA), replacement of the ribosyl ring oxygen atom with S, N(R), or C(R₁)(R₂) (R, R₁ and R₂ are each independently H, C₁-C₁₂ alkyl or a protecting group) and combinations thereof. Examples of chemically modified sugars include 2′-F-5′-methyl substituted nucleoside (see PCT International Application WO 2008/101157 Published on Aug. 21, 2008 for other disclosed 5′,2′-bis substituted nucleosides) or replacement of the ribosyl ring oxygen atom with S with further substitution at the 2′-position (see published U.S. Patent Application US2005-0130923, published on Jun. 16, 2005) or alternatively 5′-substitution of a BNA (see PCT International Application WO 2007/134181 Published on Nov. 22, 2007 wherein LNA is substituted with for example a 5′-methyl or a 5′-vinyl group).

[0322] Examples of nucleosides having modified sugar moieties include without limitation nucleosides comprising 5′-vinyl, 5′-methyl (R or S), 4-S, 2′-F, 2′-OCH₃, 2′-OCH₂CH₃, 2′—OCH₂CH₂F and 2′-O(CH₂)₂OCH₃ substituent groups. The substituent at the 2′ position can also be selected from allyl, amino, azido, thio, O-allyl, O—C₁-C₁₀ alkyl, OCF₃, OCH₂F, O(CH₂)₂SCH₃, O(CH₂)₂-O—N(Rₘ)(Rₙ), 0-CH₂—C(═O)—N(Rₘ)(Rₙ), and O—CH₂—C(═O)—N(R₁)—(CH₂)₂-N(Rₘ)(Rₙ), where each R₁, Rₘ and Rₙ is, independently, H or substituted or unsubstituted C₁-C₁₀ alkyl.

[0323] As used herein, “bicyclic nucleosides” refer to modified nucleosides comprising a bicyclic sugar moiety. Examples of bicyclic nucleosides include without limitation nucleosides comprising a bridge between the 4′ and the 2′ ribosyl ring atoms. In certain embodiments, antisense compounds provided herein include one or more bicyclic nucleosides comprising a 4′ to 2′ bridge. Examples of such 4′ to 2′ bridged bicyclic nucleosides, include but are not limited to one of the formulae: 4′-(CH₂)—O-2′ (LNA); 4′-(CH₂)—S-2′; 4′—(CH₂)₂-O-2′ (ENA); 4′-CH(CH₃)—O-2′ (also referred to as constrained ethyl or cEt) and 4′-CH(CH₂OCH₃)-0-2′ (and analogs thereof see U.S. Pat. No. 7,399,845, issued on Jul. 15, 2008); 4′-C(CH₃)(CH₃)—O-2′ (and analogs thereof see published International Application WO/2009/006478, published Jan. 8, 2009); 4′-CH₂—N(OCH₃)-2′ (and analogs thereof see published International Application WO/2008/150729, published Dec. 11, 2008); 4′-CH₂—O—N(CH₃)-2′ (see published U.S. Patent Application US2004-0171570, published Sep. 2, 2004); 4′-CH₂—N(R)—O-2′, wherein R is H, C₁-C₁₂ alkyl, or a protecting group (see U.S. Pat. No. 7,427,672, issued on Sep. 23, 2008); 4′-CH₂—C(H)(CH₃)-2′ (see Zhou et al., J. Org. Chem., 2009, 74, 118-134); and 4′-CH₂—C(═CH₂)-2′ (and analogs thereof see published International Application WO 2008/154401, published on Dec. 8, 2008).

[0324] Further reports related to bicyclic nucleosides can also be found in published literature (see for example: Singh et al., Chem. Commun., 1998, 4, 455-456; Koshkin et al., Tetrahedron, 1998, 54, 3607-3630; Wahlestedt et al., Proc. Natl. Acad. Sci. U.S.A, 2000, 97, 5633-5638; Kumar et al., Bioorg. Med. Chem. Lett., 1998, 8, 2219-2222; Singh et al., J. Org. Chem., 1998, 63, 10035-10039; Srivastava et al., J. Am. Chem. Soc., 2007, 129(26) 8362-8379; Elayadi et al., Curr. Opinion Invest. Drugs, 2001, 2, 558-561; Braasch et al., Chem. Biol., 2001, 8, 1-7; and Orum et al., Curr. Opinion Mol. Ther., 2001, 3, 239-243; U.S. Pat. Nos. 6,268,490; 6,525,191; 6,670,461; 6,770,748; 6,794,499; 7,034,133; 7,053,207; 7,399,845; 7,547,684; and 7,696,345; U.S. Patent Publication No. US2008-0039618; US2009-0012281; U.S. Patent Serial Nos. 61/026,995 and 61/097,787; Published PCT International applications WO 1999/014226; WO 2004/106356; WO 2005/021570; WO 2007/134181; WO 2008/150729; WO 2008/154401; WO 2009/006478; WO 2010/036698; WO 2011/017521; WO 2009/067647; WO 2009/100320. Each of the foregoing bicyclic nucleosides can be prepared having one or more stereochemical sugar configurations including for example α-L-ribofuranose and β-D-ribofuranose (see PCT international application PCT/DK98/00393, published on Mar. 25, 1999 as WO 99/14226).

[0325] In certain embodiments, bicyclic sugar moieties of BNA nucleosides include, but are not limited to, compounds having at least one bridge between the 4′ and the 2′ position of the pentofuranosyl sugar moiety wherein such bridges independently comprises 1 or from 2 to 4 linked groups independently selected from —[C(Rₐ)(R_{b})]ₙ—, —C(Rₐ)═C(R_{b})—, —C(Rₐ)=N—, —C(═O)—, —C(═NRₐ)—, —C(═S)—, —O—, —Si(Rₐ)₂—, —S(═O)ᵣ—, and —N(Rₐ)—; wherein:
[0326] x is 0, 1, or 2;
[0327] n is 1, 2, 3, or 4;
[0328] each Rₐ and R_{b} is, independently, H, a protecting group, hydroxyl, C₁-C₁₂ alkyl, substituted C₁-C₁₂ alkyl, C₂-C₁₂ alkenyl, substituted C₂-C₁₂ alkenyl, C₂-C₁₂ alkynyl, substituted C₂-C₁₂ alkynyl, C₅-C₂₀ aryl, substituted C₅-C₂₀ aryl, heterocycle radical, substituted heterocycle radical, heteroaryl, substituted heteroaryl, C₅-C₇ alicyclic radical, substituted C₅-C₇ alicyclic radical, halogen, OJ₁, NJ₁J₂, SJ₁, N₃, COOJ₁, acyl (C(═O)—H), substituted acyl, CN, sulfonyl (S(═O)₂-J₁), or sulfoxyl (S(═O)-J₁); and
[0329] each J₁ and J₂ is, independently, H, C₁-C₁₂ alkyl, substituted C₁-C₁₂ alkyl, C₂-C₁₂ alkenyl, substituted C₂-C₁₂ alkenyl, C₂-C₁₂ alkynyl, substituted C₂-C₁₂ alkynyl, C₅-C₂₀ aryl, substituted C₅-C₂₀ aryl, acyl (C(═O)—H), substituted acyl, a heterocycle radical, a substituted heterocycle radical, C₁-C₁₂ aminoalkyl, substituted C₁-C₁₂ aminoalkyl or a protecting group.

[0330] In certain embodiments, the bridge of a bicyclic sugar moiety is —[C(Rₐ)(R_{b})]ₙ—, —[C(Rₐ)(R_{b})]ₙ—O—, —C(RₐR_{b})—N(R)—O— or —C(RₐR_{b})—O—N(R)—. In certain embodiments, the bridge is 4′-CH₂-2′, 4′—(CH₂)₂-2′, 4′—(CH₂)₃-2′, 4′—CH₂—O-2′, 4′—(CH₂)₂-O-2′, 4′—CH₂—O—N(R)-2′ and 4′-CH₂—N(R)—O-2′- wherein each R is, independently, H, a protecting group or C₁-C₁₂ alkyl.

[0331] In certain embodiments, bicyclic nucleosides are further defined by isomeric configuration. For example, a nucleoside comprising a 4′-2′ methylene-oxy bridge, may be in the α-L configuration or in the 3-D configuration. Previously, α-L-methyleneoxy (4′-CH₂—O-2′) BNA's have been incorporated into antisense oligonucleotides that showed antisense activity (Frieden et al., Nucleic Acids Research, 2003, 21, 6365-6372).

[0332] In certain embodiments, bicyclic nucleosides include, but are not limited to, (A) α-L-methyleneoxy (4′-CH₂—O-2′) BNA, (B) β-D-methyleneoxy (4′-CH₂—O-2′) BNA, (C) ethyleneoxy (4′-(CH₂)₂-O-2′) BNA, (D) aminooxy (4′-CH₂—O—N(R)-2′) BNA, (E) oxyamino (4′-CH₂—N(R)—O-2′) BNA, and (F) methyl(methyleneoxy) (4′-CH(CH₃)—O-2′) BNA, (G) methylene-thio (4′-CH₂—S-2′) BNA, (H) methylene-amino (4′-CH₂—N(R)-2′) BNA, (I) methyl carbocyclic (4′-CH₂—CH(CH₃)-2′) BNA, (J) propylene carbocyclic (4′-(CH₂)₃-2′) BNA and (K) vinyl BNA as depicted below:

[chemical structure]

[chemical structure]

[0333] wherein Bx is the base moiety and R is independently H, a protecting group, C₁-C₁₂ alkyl or C₁-C₁₂ alkoxy.

[0334] In certain embodiments, bicyclic nucleosides are provided having Formula I:

[chemical structure]

wherein:
[0335] Bx is a heterocyclic base moiety;
[0336] -Qₐ-Q_{b}-Q_{c}- is —CH₂—N(R_{c})—CH₂—, —C(═O)—N(R_{c})—CH₂—, —CH₂—O—N(R_{c})—, —CH₂—N(R_{c})—O— or —N(R_{c})—O—CH₂;
[0337] R_{c} is C₁-C₁₂ alkyl or an amino protecting group; and
[0338] Tₐ and T_{b} are each, independently H, a hydroxyl protecting group, a conjugate group, a reactive phosphorus group, a phosphorus moiety or a covalent attachment to a support medium.

[0339] In certain embodiments, bicyclic nucleosides are provided having Formula II:

[chemical structure]

wherein:
[0340] Bx is a heterocyclic base moiety;
[0341] Tₐ and T_{b} are each, independently H, a hydroxyl protecting group, a conjugate group, a reactive phosphorus group, a phosphorus moiety or a covalent attachment to a support medium;
[0342] Zₐ is C₁-C₆ alkyl, C₂-C₆ alkenyl, C₂-C₆ alkynyl, substituted C₁-C₆ alkyl, substituted C₂-C₆ alkenyl, substituted C₂-C₆ alkynyl, acyl, substituted acyl, substituted amide, thiol or substituted thio.

[0343] In one embodiment, each of the substituted groups is, independently, mono or poly substituted with substituent groups independently selected from halogen, oxo, hydroxyl, OJ_{c}, NJ_{c}J_{d}, SJ_{c}, N₃, OC(=X)J_{c}, and NJₑC(=X)NJ_{c}J_{d}, wherein each J, J_{d} and Jₑ is, independently, H, C₁-C₆ alkyl, or substituted C₁-C₆ alkyl and X is O or NJ_{c}.

[0344] In certain embodiments, bicyclic nucleosides are provided having Formula III:

[chemical structure]

wherein:
[0345] Bx is a heterocyclic base moiety;
[0346] Tₐ and T_{b} are each, independently H, a hydroxyl protecting group, a conjugate group, a reactive phosphorus group, a phosphorus moiety or a covalent attachment to a support medium;
[0347] Z_{b} is C₁-C₆ alkyl, C₂-C₆ alkenyl, C₂-C₆ alkynyl, substituted C₁-C₆ alkyl, substituted C₂-C₆ alkenyl, substituted C₂-C₆ alkynyl or substituted acyl (C(═O)—).

[0348] In certain embodiments, bicyclic nucleosides are provided having Formula IV:

[chemical structure]

wherein:
[0349] Bx is a heterocyclic base moiety;
[0350] Tₐ and T_{b} are each, independently H, a hydroxyl protecting group, a conjugate group, a reactive phosphorus group, a phosphorus moiety or a covalent attachment to a support medium;
[0351] R_{d} is C₁-C₆ alkyl, substituted C₁-C₆ alkyl, C₂-C₆ alkenyl, substituted C₂-C₆ alkenyl, C₂-C₆ alkynyl or substituted C₂-C₆ alkynyl;
[0352] each qₐ, q_{b}, q_{c} and q_{d} is, independently, H, halogen, C₁-C₆ alkyl, substituted C₁-C₆ alkyl, C₂-C₆ alkenyl, substituted C₂-C₆ alkenyl, C₂-C₆ alkynyl or substituted C₂-C₆ alkynyl, C₁-C₆ alkoxyl, substituted C₁-C₆ alkoxyl, acyl, substituted acyl, C₁-C₆ aminoalkyl or substituted C₁-C₆ aminoalkyl;

[0353] In certain embodiments, bicyclic nucleosides are provided having Formula V:

[chemical structure]

wherein:
[0354] Bx is a heterocyclic base moiety;
[0355] Tₐ and T_{b} are each, independently H, a hydroxyl protecting group, a conjugate group, a reactive phosphorus group, a phosphorus moiety or a covalent attachment to a support medium;
[0356] qₐ, q_{b}, qₑ and q_{f} are each, independently, hydrogen, halogen, C₁-C₁₂ alkyl, substituted C₁-C₁₂ alkyl, C₂-C₁₂ alkenyl, substituted C₂-C₁₂ alkenyl, C₂-C₁₂ alkynyl, substituted C₂-C₁₂ alkynyl, C₁-C₁₂ alkoxy, substituted C₁-C₁₂ alkoxy, OJⱼ, SJⱼ, SOJⱼ, SO₂Jⱼ, NJⱼJₖ, N₃, CN, C(═O)OJⱼ, C(═O)NJⱼJₖ, C(═O)Jⱼ, O—C(═O)NJⱼJₖ, N(H)C(=NH)NJⱼJₖ, N(H)C(═O)NJⱼJₖ or N(H)C(═S)NJⱼJₖ;
[0357] or qₑ and q_{f} together are ═C(q_{g})(qₕ);
[0358] q_{g} and qₕ are each, independently, H, halogen, C₁-C₁₂ alkyl or substituted C₁-C₁₂ alkyl.

[0359] The synthesis and preparation of the methyleneoxy (4′-CH₂—O-2′) BNA monomers adenine, cytosine, guanine, 5-methyl-cytosine, thymine and uracil, along with their oligomerization, and nucleic acid recognition properties have been described (Koshkin et al., Tetrahedron, 1998, 54, 3607-3630). BNAs and preparation thereof are also described in WO 98/39352 and WO 99/14226.

[0360] Analogs of methyleneoxy (4′-CH₂—O-2′) BNA and 2′-thio-BNAs, have also been prepared (Kumar et al., Bioorg. Med. Chem. Lett., 1998, 8, 2219-2222). Preparation of locked nucleoside analogs comprising oligodeoxyribonucleotide duplexes as substrates for nucleic acid polymerases has also been described (Wengel et al., WO 99/14226). Furthermore, synthesis of 2′-amino-BNA, a novel conformationally restricted high-affinity oligonucleotide analog has been described in the art (Singh et al., J. Org. Chem., 1998, 63, 10035-10039). In addition, 2′-amino- and 2′-methylamino-BNA's have been prepared and the thermal stability of their duplexes with complementary RNA and DNA strands has been previously reported.

[0361] In certain embodiments, bicyclic nucleosides are provided having Formula VI:

[chemical structure]

wherein:
[0362] Bx is a heterocyclic base moiety;
[0363] Tₐ and T_{b} are each, independently H, a hydroxyl protecting group, a conjugate group, a reactive phosphorus group, a phosphorus moiety or a covalent attachment to a support medium;
[0364] each qᵢ, q^{j}, qₖ and qₗ is, independently, H, halogen, C₁-C₁₂ alkyl, substituted C₁-C₁₂ alkyl, C₂-C₁₂ alkenyl, substituted C₂-C₁₂ alkenyl, C₂-C₁₂ alkynyl, substituted C₂-C₁₂ alkynyl, C₁-C₁₂ alkoxyl, substituted C₁-C₁₂ alkoxyl, OJⱼ, SJⱼ, SOJⱼ, SO₂Jⱼ, NJⱼJₖ, N₃, CN, C(═O)OJⱼ, C(═O)NJⱼJₖ, C(═O)Jⱼ, O—C(═O)NJⱼJₖ, N(H)C(=NH)NJⱼJₖ, N(H)C(═O)NJⱼJₖ or N(H)C(═S)NJⱼJₖ; and
[0365] qᵢ and q, or qᵢ and qₖ together are ═C(q_{g})(qₕ), wherein q_{g} and qₕ are each, independently, H, halogen, C₁-C₁₂ alkyl or substituted C₁-C₁₂ alkyl.

[0366] One carbocyclic bicyclic nucleoside having a 4′-(CH₂)₃-2′ bridge and the alkenyl analog bridge 4′-CH═CH—CH₂-2′ have been described (Freier et al., Nucleic Acids Research, 1997, 25(22), 4429-4443 and Albaek et al., J. Org. Chem., 2006, 71, 7731-7740). The synthesis and preparation of carbocyclic bicyclic nucleosides along with their oligomerization and biochemical studies have also been described (Srivastava et al., J. Am. Chem. Soc., 2007, 129(26), 8362-8379).

[0367] As used herein, “4′-2′ bicyclic nucleoside” or “4′ to 2′ bicyclic nucleoside” refers to a bicyclic nucleoside comprising a furanose ring comprising a bridge connecting two carbon atoms of the furanose ring connects the 2′ carbon atom and the 4′ carbon atom of the sugar ring.

[0368] As used herein, “monocylic nucleosides” refer to nucleosides comprising modified sugar moieties that are not bicyclic sugar moieties. In certain embodiments, the sugar moiety, or sugar moiety analogue, of a nucleoside may be modified or substituted at any position.

[0369] As used herein, “2′-modified sugar” means a furanosyl sugar modified at the 2′ position. In certain embodiments, such modifications include substituents selected from: a halide, including, but not limited to substituted and unsubstituted alkoxy, substituted and unsubstituted thioalkyl, substituted and unsubstituted amino alkyl, substituted and unsubstituted alkyl, substituted and unsubstituted allyl, and substituted and unsubstituted alkynyl. In certain embodiments, 2′ modifications are selected from substituents including, but not limited to: O[(CH₂)ₙO]ₘCH₃, O(CH₂)ₙNH₂, O(CH₂)ₙCH₃, O(CH₂)ₙF, O(CH₂)ₙONH₂, OCH₂C(═O)N(H)CH₃, and O(CH₂)ₙON[(CH₂)ₙCH₃]₂, where n and m are from 1 to about 10. Other 2′-substituent groups can also be selected from: C₁-C₁₂ alkyl, substituted alkyl, alkenyl, alkynyl, alkaryl, aralkyl, O-alkaryl or O-aralkyl, SH, SCH₃, OCN, Cl, Br, CN, F, CF₃, OCF₃, SOCH₃, SO₂CH₃, ONO₂, NO₂, N₃, NH₂, heterocycloalkyl, heterocycloalkaryl, aminoalkylamino, polyalkylamino, substituted silyl, an RNA cleaving group, a reporter group, an intercalator, a group for improving pharmacokinetic properties, or a group for improving the pharmacodynamic properties of an antisense compound, and other substituents having similar properties. In certain embodiments, modified nucleosides comprise a 2′-MOE side chain (Baker et al., J. Biol. Chem., 1997, 272, 11944-12000). Such 2′-MOE substitution have been described as having improved binding affinity compared to unmodified nucleosides and to other modified nucleosides, such as 2′-O-methyl, O-propyl, and O-aminopropyl. Oligonucleotides having the 2′-MOE substituent also have been shown to be antisense inhibitors of gene expression with promising features for in vivo use (Martin, Helv. Chim. Acta, 1995, 78, 486-504; Altmann et al., Chimia, 1996, 50, 168-176; Altmann et al., Biochem. Soc. Trans., 1996, 24, 630-637; and Altmann et al., Nucleosides Nucleotides, 1997, 16, 917-926).

[0370] As used herein, a “modified tetrahydropyran nucleoside” or “modified THP nucleoside” means a nucleoside having a six-membered tetrahydropyran “sugar” substituted in for the pentofuranosyl residue in normal nucleosides (a sugar surrogate). Modified THP nucleosides include, but are not limited to, what is referred to in the art as hexitol nucleic acid (HNA), anitol nucleic acid (ANA), manitol nucleic acid (MNA) (see Leumann, Bioorg. Med. Chem., 2002, 10, 841-1954) or fluoro HNA (F-HNA) having a tetrahydropyran ring system as illustrated below:

[chemical structure]

[0371] In certain embodiments, sugar surrogates are selected having Formula VII:

[chemical structure]

wherein independently for each of said at least one tetrahydropyran nucleoside analog of Formula VII:
[0372] Bx is a heterocyclic base moiety;
[0373] Tₐ and T_{b} are each, independently, an internucleoside linking group linking the tetrahydropyran nucleoside analog to the antisense compound or one of Tₐ and T_{b} is an internucleoside linking group linking the tetrahydropyran nucleoside analog to the antisense compound and the other of Tₐ and T_{b} is H, a hydroxyl protecting group, a linked conjugate group or a 5′ or 3′-terminal group;
[0374] qᵢ, q₂, q₃, q₄, q₅, q₆ and q₇ are each independently, H, C₁-C₆ alkyl, substituted C₁-C₆ alkyl, C₂-C₆ alkenyl, substituted C₂-C₆ alkenyl, C₂-C₆ alkynyl or substituted C₂-C₆ alkynyl; and each of R₁ and R₂ is selected from hydrogen, hydroxyl, halogen, substituted or unsubstituted alkoxy, NJ₁J₂, SJ₁, N₃, OC(=X)J₁, OC(=X)NJ₁J₂, NJ₃C(=X)NJ₁J₂ and CN, wherein X is O, S or NJ₁ and each J₁, J₂ and J₃ is, independently, H or C₁-C₆ alkyl.

[0375] In certain embodiments, the modified THP nucleosides of Formula VII are provided wherein q₁, q₂, q₃, q₄, q₅, q₆ and q₇ are each H. In certain embodiments, at least one of q₁, q₂, q₃, q₄, q₅, q₆ and q₇ is other than H. In certain embodiments, at least one of q₁, q₂, q₃, q₄, q₅, q₆ and q₇ is methyl. In certain embodiments, THP nucleosides of Formula VII are provided wherein one of R₁ and R₂ is fluoro. In certain embodiments, R₁ is fluoro and R₂ is H; R₁ is methoxy and R₂ is H, and R₁ is methoxyethoxy and R₂ is H.

[0376] In certain embodiments, sugar surrogates comprise rings having more than 5 atoms and more than one heteroatom. For example nucleosides comprising morpholino sugar moieties and their use in oligomeric compounds has been reported (see for example: Braasch et al., Biochemistry, 2002, 41, 4503-4510; and U.S. Pat. Nos. 5,698,685; 5,166,315; 5,185,444; and 5,034,506). As used here, the term “morpholino” means a sugar surrogate having the following formula:

[chemical structure]

In certain embodiments, morpholinos may be modified, for example by adding or altering various substituent groups from the above morpholino structure. Such sugar surrogates are referred to herein as “modified morpholinos.”

[0377] Combinations of modifications are also provided without limitation, such as 2′-F-5′-methyl substituted nucleosides (see PCT International Application WO 2008/101157 published on Aug. 21, 2008 for other disclosed 5′, 2′-bis substituted nucleosides) and replacement of the ribosyl ring oxygen atom with S and further substitution at the 2′-position (see published U.S. Patent Application US2005-0130923, published on Jun. 16, 2005) or alternatively 5′-substitution of a bicyclic nucleic acid (see PCT International Application WO 2007/134181, published on Nov. 22, 2007 wherein a 4′-CH₂—O-2′ bicyclic nucleoside is further substituted at the 5′ position with a 5′-methyl or a 5′-vinyl group). The synthesis and preparation of carbocyclic bicyclic nucleosides along with their oligomerization and biochemical studies have also been described (see, e.g., Srivastava et al., J. Am. Chem. Soc. 2007, 129(26), 8362-8379).

[0378] In certain embodiments, antisense compounds comprise one or more modified cyclohexenyl nucleosides, which is a nucleoside having a six-membered cyclohexenyl in place of the pentofuranosyl residue in naturally occurring nucleosides. Modified cyclohexenyl nucleosides include, but are not limited to those described in the art (see for example commonly owned, published PCT Application WO 2010/036696, published on Apr. 10, 2010, Robeyns et al., J. Am. Chem. Soc., 2008, 130(6), 1979-1984; Horvith et al., Tetrahedron Letters, 2007, 48, 3621-3623; Nauwelaerts et al., J. Am. Chem. Soc., 2007, 129(30), 9340-9348; Gu et al., Nucleosides, Nucleotides & Nucleic Acids, 2005, 24(5-7), 993-998; Nauwelaerts et al., Nucleic Acids Research, 2005, 33(8), 2452-2463; Robeyns et al., Acta Crystallographica, Section F: Structural Biology and Crystallization Communications, 2005, F61(6), 585-586; Gu et al., Tetrahedron, 2004, 60(9), 2111-2123; Gu et al., Oligonucleotides, 2003, 13(6), 479-489; Wang et al., J. Org. Chem., 2003, 68, 4499-4505; Verbeure et al., Nucleic Acids Research, 2001, 29(24), 4941-4947; Wang et al., J. Org. Chem., 2001, 66, 8478-82; Wang et al., Nucleosides, Nucleotides & Nucleic Acids, 2001, 20(4-7), 785-788; Wang et al., J. Am. Chem., 2000, 122, 8595-8602; Published PCT application, WO 06/047842; and Published PCT Application WO 01/049687; the text of each is incorporated by reference herein, in their entirety). Certain modified cyclohexenyl nucleosides have Formula X.

[chemical structure]

[0379] wherein independently for each of said at least one cyclohexenyl nucleoside analog of Formula X:
[0380] Bx is a heterocyclic base moiety;
[0381] T₃ and T₄ are each, independently, an internucleoside linking group linking the cyclohexenyl nucleoside analog to an antisense compound or one of T₃ and T₄ is an internucleoside linking group linking the tetrahydropyran nucleoside analog to an antisense compound and the other of T₃ and T₄ is H, a hydroxyl protecting group, a linked conjugate group, or a 5′- or 3′-terminal group; and
[0382] q₁, q₂, q₃, q₄, q₅, q₆, q₇, q₈ and q₉ are each, independently, H, C₁-C₆ alkyl, substituted C₁-C₆ alkyl, C₂-C₆ alkenyl, substituted C₂-C₆ alkenyl, C₂-C₆ alkynyl, substituted C₂-C₆ alkynyl or other sugar substituent group.

[0383] As used herein, “2′-modified” or “2′-substituted” refers to a nucleoside comprising a sugar comprising a substituent at the 2′ position other than H or OH. 2′-modified nucleosides, include, but are not limited to, bicyclic nucleosides wherein the bridge connecting two carbon atoms of the sugar ring connects the 2′ carbon and another carbon of the sugar ring; and nucleosides with non-bridging 2′ substituents, such as allyl, amino, azido, thio, 0-allyl, 0-C₁-C₁₀ alkyl, —OCF₃, O—(CH₂)₂-O—CH₃, 2′—O(CH₂)₂SCH₃, O—(CH₂)₂-O—N(Rₘ)(Rₙ), or O—CH₂—C(═O)—N(Rₘ)(Rₙ), where each Rₘ and Rₙ is, independently, H or substituted or unsubstituted C₁-C₁₀ alkyl. 2′-modified nucleosides may further comprise other modifications, for example at other positions of the sugar and/or at the nucleobase.

[0384] As used herein, “2′-F” refers to a nucleoside comprising a sugar comprising a fluoro group at the 2′ position of the sugar ring.

[0385] As used herein, “2′-OMe” or “2′-OCH₃” or “2′-O-methyl” each refers to a nucleoside comprising a sugar comprising an —OCH₃ group at the 2′ position of the sugar ring. As used herein, “MOE” or “2′-MOE” or “2′-OCH₂CH₂OCH₃” or “2′-O-methoxyethyl” each refers to a nucleoside comprising a sugar comprising a —OCH₂CH₂OCH₃ group at the 2′ position of the sugar ring. As used herein, “oligonucleotide” refers to a compound comprising a plurality of linked nucleosides.

[0386] In certain embodiments, one or more of the plurality of nucleosides is modified. In certain embodiments, an oligonucleotide comprises one or more ribonucleosides (RNA) and/or deoxyribonucleosides (DNA). Many other bicyclo and tricyclo sugar surrogate ring systems are also known in the art that can be used to modify nucleosides for incorporation into antisense compounds (see for example review article: Leumann, Bioorg. Med. Chem., 2002, 10, 841-1954). Such ring systems can undergo various additional substitutions to enhance activity.

[0387] Methods for the preparations of modified sugars are well known to those skilled in the art. Some representative U.S. patents that teach the preparation of such modified sugars include without limitation, U.S.: 4,981,957; 5,118,800; 5,319,080; 5,359,044; 5,393,878; 5,446,137; 5,466,786; 5,514,785; 5,519,134; 5,567,811; 5,576,427; 5,591,722; 5,597,909; 5,610,300; 5,627,053; 5,639,873; 5,646,265; 5,670,633; 5,700,920; 5,792,847 and 6,600,032 and International Application PCT/US2005/019219, filed Jun. 2, 2005 and published as WO 2005/121371 on Dec. 22, 2005, and each of which is herein incorporated by reference in its entirety.

[0388] In nucleotides having modified sugar moieties, the nucleobase moieties (natural, modified or a combination thereof) are maintained for hybridization with an appropriate nucleic acid target.

[0389] In certain embodiments, antisense compounds comprise one or more nucleosides having modified sugar moieties. In certain embodiments, the modified sugar moiety is 2′-MOE. In certain embodiments, the 2′-MOE modified nucleosides are arranged in a gapmer motif. In certain embodiments, the modified sugar moiety is a bicyclic nucleoside having a (4′-CH(CH₃)—O-2′) bridging group. In certain embodiments, the (4′-CH(CH₃)—O-2′) modified nucleosides are arranged throughout the wings of a gapmer motif.

### Conjugated Antisense Compounds

[0390] In certain embodiments, the present disclosure provides conjugated antisense compounds. In certain embodiments, the present disclosure provides conjugated antisense compounds comprising an antisense oligonucleotide complementary to a nucleic acid transcript. In certain embodiments, the present disclosure provides methods comprising contacting a cell with a conjugated antisense compound comprising an antisense oligonucleotide complementary to a nucleic acid transcript. In certain embodiments, the present disclosure provides methods comprising contacting a cell with a conjugated antisense compound comprising an antisense oligonucleotide and reducing the amount or activity of a nucleic acid transcript in a cell.

[0391] The asialoglycoprotein receptor (ASGP-R) has been described previously. See e.g., Park et al., PNAS vol. 102, No. 47, pp 17125-17129 (2005). Such receptors are expressed on liver cells, particularly hepatocytes. Further, it has been shown that compounds comprising clusters of three N-acetylgalactosamine (GalNAc) ligands are capable of binding to the ASGP-R, resulting in uptake of the compound into the cell. See e.g., Khorev et al., Bioorganic and Medicinal Chemistry, 16, 9, pp 5216-5231 (May 2008). Accordingly, conjugates comprising such GalNAc clusters have been used to facilitate uptake of certain compounds into liver cells, specifically hepatocytes. For example it has been shown that certain GalNAc-containing conjugates increase activity of duplex siRNA compounds in liver cells in vivo. In such instances, the GalNAc-containing conjugate is typically attached to the sense strand of the siRNA duplex. Since the sense strand is discarded before the antisense strand ultimately hybridizes with the target nucleic acid, there is little concern that the conjugate will interfere with activity. Typically, the conjugate is attached to the 3′ end of the sense strand of the siRNA. See e.g., U.S. Pat. No. 8,106,022. Certain conjugate groups described herein are more active and/or easier to synthesize than conjugate groups previously described.

[0392] In certain embodiments of the present invention, conjugates are attached to single-stranded antisense compounds, including, but not limited to RNase H based antisense compounds and antisense compounds that alter splicing of a pre-mRNA target nucleic acid. In such embodiments, the conjugate should remain attached to the antisense compound long enough to provide benefit (improved uptake into cells) but then should either be cleaved, or otherwise not interfere with the subsequent steps necessary for activity, such as hybridization to a target nucleic acid and interaction with RNase H or enzymes associated with splicing or splice modulation. This balance of properties is more important in the setting of single-stranded antisense compounds than in siRNA compounds, where the conjugate may simply be attached to the sense strand. Disclosed herein are conjugated single-stranded antisense compounds having improved potency in liver cells in vivo compared with the same antisense compound lacking the conjugate. Given the required balance of properties for these compounds such improved potency is surprising.

[0393] In certain embodiments, conjugate groups herein comprise a cleavable moiety. As noted, without wishing to be bound by mechanism, it is logical that the conjugate should remain on the compound long enough to provide enhancement in uptake, but after that, it is desirable for some portion or, ideally, all of the conjugate to be cleaved, releasing the parent compound (e.g., antisense compound) in its most active form. In certain embodiments, the cleavable moiety is a cleavable nucleoside. Such embodiments take advantage of endogenous nucleases in the cell by attaching the rest of the conjugate (the cluster) to the antisense oligonucleotide through a nucleoside via one or more cleavable bonds, such as those of a phosphodiester linkage. In certain embodiments, the cluster is bound to the cleavable nucleoside through a phosphodiester linkage. In certain embodiments, the cleavable nucleoside is attached to the antisense oligonucleotide (antisense compound) by a phosphodiester linkage. In certain embodiments, the conjugate group may comprise two or three cleavable nucleosides. In such embodiments, such cleavable nucleosides are linked to one another, to the antisense compound and/or to the cluster via cleavable bonds (such as those of a phosphodiester linkage). Certain conjugates herein do not comprise a cleavable nucleoside and instead comprise a cleavable bond. It is shown that that sufficient cleavage of the conjugate from the oligonucleotide is provided by at least one bond that is vulnerable to cleavage in the cell (a cleavable bond).

[0394] In certain embodiments, conjugated antisense compounds are prodrugs. Such prodrugs are administered to an animal and are ultimately metabolized to a more active form. For example, conjugated antisense compounds are cleaved to remove all or part of the conjugate resulting in the active (or more active) form of the antisense compound lacking all or some of the conjugate.

[0395] In certain embodiments, conjugates are attached at the 5′ end of an oligonucleotide. Certain such 5′-conjugates are cleaved more efficiently than counterparts having a similar conjugate group attached at the 3′ end. In certain embodiments, improved activity may correlate with improved cleavage. In certain embodiments, oligonucleotides comprising a conjugate at the 5′ end have greater efficacy than oligonucleotides comprising a conjugate at the 3′ end (see, for example, Examples 56, 81, 83, and 84). Further, 5′-attachment allows simpler oligonucleotide synthesis. Typically, oligonucleotides are synthesized on a solid support in the 3′ to 5′ direction. To make a 3′-conjugated oligonucleotide, typically one attaches a pre-conjugated 3′ nucleoside to the solid support and then builds the oligonucleotide as usual. However, attaching that conjugated nucleoside to the solid support adds complication to the synthesis. Further, using that approach, the conjugate is then present throughout the synthesis of the oligonucleotide and can become degraded during subsequent steps or may limit the sorts of reactions and reagents that can be used. Using the structures and techniques described herein for 5′-conjugated oligonucleotides, one can synthesize the oligonucleotide using standard automated techniques and introduce the conjugate with the final (5′-most) nucleoside or after the oligonucleotide has been cleaved from the solid support.

[0396] In view of the art and the present disclosure, one of ordinary skill can easily make any of the conjugates and conjugated oligonucleotides herein. Moreover, synthesis of certain such conjugates and conjugated oligonucleotides disclosed herein is easier and/or requires few steps, and is therefore less expensive than that of conjugates previously disclosed, providing advantages in manufacturing. For example, the synthesis of certain conjugate groups consists of fewer synthetic steps, resulting in increased yield, relative to conjugate groups previously described. Conjugate groups such as GalNAc3-10 in Example 46 and GalNAc3-7 in Example 48 are much simpler than previously described conjugates such as those described in U.S. Pat. No. 8,106,022 or U.S. Pat. No. 7,262,177 that require assembly of more chemical intermediates. Accordingly, these and other conjugates described herein have advantages over previously described compounds for use with any oligonucleotide, including single-stranded oligonucleotides and either strand of double-stranded oligonucleotides (e.g., siRNA).

[0397] Similarly, disclosed herein are conjugate groups having only one or two GalNAc ligands. As shown, such conjugates groups improve activity of antisense compounds. Such compounds are much easier to prepare than conjugates comprising three GalNAc ligands. Conjugate groups comprising one or two GalNAc ligands may be attached to any antisense compounds, including single-stranded oligonucleotides and either strand of double-stranded oligonucleotides (e.g., siRNA).

[0398] In certain embodiments, the conjugates herein do not substantially alter certain measures of tolerability. For example, it is shown herein that conjugated antisense compounds are not more immunogenic than unconjugated parent compounds. Since potency is improved, embodiments in which tolerability remains the same (or indeed even if tolerability worsens only slightly compared to the gains in potency) have improved properties for therapy.

[0399] In certain embodiments, conjugation allows one to alter antisense compounds in ways that have less attractive consequences in the absence of conjugation. For example, in certain embodiments, replacing one or more phosphorothioate linkages of a fully phosphorothioate antisense compound with phosphodiester linkages results in improvement in some measures of tolerability. For example, in certain instances, such antisense compounds having one or more phosphodiester are less immunogenic than the same compound in which each linkage is a phosphorothioate. However, in certain instances, as shown in Example 26, that same replacement of one or more phosphorothioate linkages with phosphodiester linkages also results in reduced cellular uptake and/or loss in potency. In certain embodiments, conjugated antisense compounds described herein tolerate such change in linkages with little or no loss in uptake and potency when compared to the conjugated full-phosphorothioate counterpart. In fact, in certain embodiments, for example, in Examples 44, 57, 59, and 86, oligonucleotides comprising a conjugate and at least one phosphodiester internucleoside linkage actually exhibit increased potency in vivo even relative to a full phosphorothioate counterpart also comprising the same conjugate. Moreover, since conjugation results in substantial increases in uptake/potency a small loss in that substantial gain may be acceptable to achieve improved tolerability. Accordingly, in certain embodiments, conjugated antisense compounds comprise at least one phosphodiester linkage.

[0400] In certain embodiments, conjugation of antisense compounds herein results in increased delivery, uptake and activity in hepatocytes. Thus, more compound is delivered to liver tissue. However, in certain embodiments, that increased delivery alone does not explain the entire increase in activity. In certain such embodiments, more compound enters hepatocytes. In certain embodiments, even that increased hepatocyte uptake does not explain the entire increase in activity. In such embodiments, productive uptake of the conjugated compound is increased. For example, as shown in Example 102, certain embodiments of GalNAc-containing conjugates increase enrichment of antisense oligonucleotides in hepatocytes versus non-parenchymal cells. This enrichment is beneficial for oligonucleotides that target genes that are expressed in hepatocytes.

[0401] In certain embodiments, conjugated antisense compounds herein result in reduced kidney exposure. For example, as shown in Example 20, the concentrations of antisense oligonucleotides comprising certain embodiments of GalNAc-containing conjugates are lower in the kidney than that of antisense oligonucleotides lacking a GalNAc-containing conjugate. This has several beneficial therapeutic implications. For therapeutic indications where activity in the kidney is not sought, exposure to kidney risks kidney toxicity without corresponding benefit. Moreover, high concentration in kidney typically results in loss of compound to the urine resulting in faster clearance. Accordingly for non-kidney targets, kidney accumulation is undesired.

[0402] In certain embodiments, the present disclosure provides conjugated antisense compounds represented by the formula:

[chemical structure]

[0403] wherein
[0404] A is the antisense oligonucleotide;
[0405] B is the cleavable moiety
[0406] C is the conjugate linker
[0407] D is the branching group
[0408] each E is a tether;
[0409] each F is a ligand; and
[0410] q is an integer between 1 and 5.

[0411] In the above diagram and in similar diagrams herein, the branching group “D” branches as many times as is necessary to accommodate the number of (E-F) groups as indicated by “q”. Thus, where q=1, the formula is:

[chemical structure]

[0412] where q=2, the formula is:

[chemical structure]

[0413] where q=3, the formula is:

[chemical structure]

[0414] where q=4, the formula is:

[chemical structure]

[0415] where q=5, the formula is:

[chemical structure]

[0416] In certain embodiments, conjugated antisense compounds are provided having the structure:

[chemical structure]

[0417] In certain embodiments, conjugated antisense compounds are provided having the structure:

[chemical structure]

[0418] In certain embodiments, conjugated antisense compounds are provided having the structure:

[chemical structure]

[0419] In certain embodiments, conjugated antisense compounds are provided having the structure:

[chemical structure]

[0420] In embodiments having more than one of a particular variable (e.g., more than one “m” or “n”), unless otherwise indicated, each such particular variable is selected independently. Thus, for a structure having more than one n, each n is selected independently, so they may or may not be the same as one another.

i. Certain Cleavable Moieties

[0421] In certain embodiments, a cleavable moiety is a cleavable bond. In certain embodiments, a cleavable moiety comprises a cleavable bond. In certain embodiments, the conjugate group comprises a cleavable moiety. In certain such embodiments, the cleavable moiety attaches to the antisense oligonucleotide. In certain such embodiments, the cleavable moiety attaches directly to the cell-targeting moiety. In certain such embodiments, the cleavable moiety attaches to the conjugate linker. In certain embodiments, the cleavable moiety comprises a phosphate or phosphodiester. In certain embodiments, the cleavable moiety is a cleavable nucleoside or nucleoside analog. In certain embodiments, the nucleoside or nucleoside analog comprises an optionally protected heterocyclic base selected from a purine, substituted purine, pyrimidine or substituted pyrimidine. In certain embodiments, the cleavable moiety is a nucleoside comprising an optionally protected heterocyclic base selected from uracil, thymine, cytosine, 4-N-benzoylcytosine, 5-methylcytosine, 4-N-benzoyl-5-methylcytosine, adenine, 6-N-benzoyladenine, guanine and 2-N-isobutyrylguanine. In certain embodiments, the cleavable moiety is 2′-deoxy nucleoside that is attached to the 3′ position of the antisense oligonucleotide by a phosphodiester linkage and is attached to the linker by a phosphodiester or phosphorothioate linkage. In certain embodiments, the cleavable moiety is 2′-deoxy adenosine that is attached to the 3′ position of the antisense oligonucleotide by a phosphodiester linkage and is attached to the linker by a phosphodiester or phosphorothioate linkage. In certain embodiments, the cleavable moiety is 2′-deoxy adenosine that is attached to the 3′ position of the antisense oligonucleotide by a phosphodiester linkage and is attached to the linker by a phosphodiester linkage.

[0422] In certain embodiments, the cleavable moiety is attached to the 3′ position of the antisense oligonucleotide. In certain embodiments, the cleavable moiety is attached to the 5′ position of the antisense oligonucleotide. In certain embodiments, the cleavable moiety is attached to a 2′ position of the antisense oligonucleotide. In certain embodiments, the cleavable moiety is attached to the antisense oligonucleotide by a phosphodiester linkage. In certain embodiments, the cleavable moiety is attached to the linker by either a phosphodiester or a phosphorothioate linkage. In certain embodiments, the cleavable moiety is attached to the linker by a phosphodiester linkage. In certain embodiments, the conjugate group does not include a cleavable moiety.

[0423] In certain embodiments, the cleavable moiety is cleaved after the complex has been administered to an animal only after being internalized by a targeted cell. Inside the cell the cleavable moiety is cleaved thereby releasing the active antisense oligonucleotide. While not wanting to be bound by theory it is believed that the cleavable moiety is cleaved by one or more nucleases within the cell. In certain embodiments, the one or more nucleases cleave the phosphodiester linkage between the cleavable moiety and the linker. In certain embodiments, the cleavable moiety has a structure selected from among the following:

[chemical structure]

wherein each of Bx, Bx₁, Bx₂, and Bx₃ is independently a heterocyclic base moiety. In certain embodiments, the cleavable moiety has a structure selected from among the following:

[chemical structure]

ii. Certain Linkers

[0424] In certain embodiments, the conjugate groups comprise a linker. In certain such embodiments, the linker is covalently bound to the cleavable moiety. In certain such embodiments, the linker is covalently bound to the antisense oligonucleotide. In certain embodiments, the linker is covalently bound to a cell-targeting moiety. In certain embodiments, the linker further comprises a covalent attachment to a solid support. In certain embodiments, the linker further comprises a covalent attachment to a protein binding moiety. In certain embodiments, the linker further comprises a covalent attachment to a solid support and further comprises a covalent attachment to a protein binding moiety. In certain embodiments, the linker includes multiple positions for attachment of tethered ligands. In certain embodiments, the linker includes multiple positions for attachment of tethered ligands and is not attached to a branching group. In certain embodiments, the linker further comprises one or more cleavable bond. In certain embodiments, the conjugate group does not include a linker.

[0425] In certain embodiments, the linker includes at least a linear group comprising groups selected from alkyl, amide, disulfide, polyethylene glycol, ether, thioether (—S—) and hydroxylamino (—O—N(H)—) groups. In certain embodiments, the linear group comprises groups selected from alkyl, amide and ether groups. In certain embodiments, the linear group comprises groups selected from alkyl and ether groups. In certain embodiments, the linear group comprises at least one phosphorus linking group. In certain embodiments, the linear group comprises at least one phosphodiester group. In certain embodiments, the linear group includes at least one neutral linking group. In certain embodiments, the linear group is covalently attached to the cell-targeting moiety and the cleavable moiety. In certain embodiments, the linear group is covalently attached to the cell-targeting moiety and the antisense oligonucleotide. In certain embodiments, the linear group is covalently attached to the cell-targeting moiety, the cleavable moiety and a solid support. In certain embodiments, the linear group is covalently attached to the cell-targeting moiety, the cleavable moiety, a solid support and a protein binding moiety. In certain embodiments, the linear group includes one or more cleavable bond.

[0426] In certain embodiments, the linker includes the linear group covalently attached to a scaffold group. In certain embodiments, the scaffold includes a branched aliphatic group comprising groups selected from alkyl, amide, disulfide, polyethylene glycol, ether, thioether and hydroxylamino groups. In certain embodiments, the scaffold includes a branched aliphatic group comprising groups selected from alkyl, amide and ether groups. In certain embodiments, the scaffold includes at least one mono or polycyclic ring system. In certain embodiments, the scaffold includes at least two mono or polycyclic ring systems. In certain embodiments, the linear group is covalently attached to the scaffold group and the scaffold group is covalently attached to the cleavable moiety and the linker. In certain embodiments, the linear group is covalently attached to the scaffold group and the scaffold group is covalently attached to the cleavable moiety, the linker and a solid support. In certain embodiments, the linear group is covalently attached to the scaffold group and the scaffold group is covalently attached to the cleavable moiety, the linker and a protein binding moiety. In certain embodiments, the linear group is covalently attached to the scaffold group and the scaffold group is covalently attached to the cleavable moiety, the linker, a protein binding moiety and a solid support. In certain embodiments, the scaffold group includes one or more cleavable bond.

[0427] In certain embodiments, the linker includes a protein binding moiety. In certain embodiments, the protein binding moiety is a lipid such as for example including but not limited to cholesterol, cholic acid, adamantane acetic acid, 1-pyrene butyric acid, dihydrotestosterone, 1,3-Bis-O(hexadecyl)glycerol, geranyloxyhexyl group, hexadecylglycerol, borneol, menthol, 1,3-propanediol, heptadecyl group, palmitic acid, myristic acid, O3-(oleoyl)lithocholic acid, O3-(oleoyl)cholenic acid, dimethoxytrityl, or phenoxazine), a vitamin (e.g., folate, vitamin A, vitamin E, biotin, pyridoxal), a peptide, a carbohydrate (e.g., monosaccharide, disaccharide, trisaccharide, tetrasaccharide, oligosaccharide, polysaccharide), an endosomolytic component, a steroid (e.g., uvaol, hecigenin, diosgenin), a terpene (e.g., triterpene, e.g., sarsasapogenin, friedelin, epifriedelanol derivatized lithocholic acid), or a cationic lipid. In certain embodiments, the protein binding moiety is a C16 to C22 long chain saturated or unsaturated fatty acid, cholesterol, cholic acid, vitamin E, adamantane or 1-pentafluoropropyl.

[0428] In certain embodiments, a linker has a structure selected from among:

[chemical structure]

[chemical structure]

[0429] wherein each n is, independently, from 1 to 20; and p is from 1 to 6.

[0430] In certain embodiments, a linker has a structure selected from among:

[chemical structure]

[chemical structure]

[0431] wherein each n is, independently, from 1 to 20.
[0432] In certain embodiments, a linker has a structure selected from among:

[chemical structure]

[chemical structure]

[0433] wherein n is from 1 to 20.

[0434] In certain embodiments, a linker has a structure selected from among:

[chemical structure]

[chemical structure]

[0435] wherein each L is, independently, a phosphorus linking group or a neutral linking group; and
[0436] each n is, independently, from 1 to 20.

[0437] In certain embodiments, a linker has a structure selected from among:

[chemical structure]

[chemical structure]

[chemical structure]

[chemical structure]

[0438] In certain embodiments, a linker has a structure selected from among:

[chemical structure]

[chemical structure]

[0439] In certain embodiments, a linker has a structure selected from among:

[chemical structure]

[chemical structure]

[0440] In certain embodiments, a linker has a structure selected from among:

[chemical structure]

[0441] wherein n is from 1 to 20.

[0442] In certain embodiments, a linker has a structure selected from among:

[chemical structure]

[0443] In certain embodiments, a linker has a structure selected from among:

[chemical structure]

[0444] In certain embodiments, a linker has a structure selected from among:

[chemical structure]

[0445] In certain embodiments, the conjugate linker has the structure:

[chemical structure]

[0446] In certain embodiments, the conjugate linker has the structure:

[chemical structure]

[0447] In certain embodiments, a linker has a structure selected from among:

[chemical structure]

[0448] In certain embodiments, a linker has a structure selected from among:

[chemical structure]

[0449] wherein each n is independently, 0, 1, 2, 3, 4, 5, 6, or 7.
   iii. Certain Cell-Targeting Moieties

[0450] In certain embodiments, conjugate groups comprise cell-targeting moieties. Certain such cell-targeting moieties increase cellular uptake of antisense compounds. In certain embodiments, cell-targeting moieties comprise a branching group, one or more tether, and one or more ligand. In certain embodiments, cell-targeting moieties comprise a branching group, one or more tether, one or more ligand and one or more cleavable bond.

### 1. Certain Branching Groups

[0451] In certain embodiments, the conjugate groups comprise a targeting moiety comprising a branching group and at least two tethered ligands. In certain embodiments, the branching group attaches the conjugate linker. In certain embodiments, the branching group attaches the cleavable moiety. In certain embodiments, the branching group attaches the antisense oligonucleotide. In certain embodiments, the branching group is covalently attached to the linker and each of the tethered ligands. In certain embodiments, the branching group comprises a branched aliphatic group comprising groups selected from alkyl, amide, disulfide, polyethylene glycol, ether, thioether and hydroxylamino groups. In certain embodiments, the branching group comprises groups selected from alkyl, amide and ether groups. In certain embodiments, the branching group comprises groups selected from alkyl and ether groups. In certain embodiments, the branching group comprises a mono or polycyclic ring system. In certain embodiments, the branching group comprises one or more cleavable bond. In certain embodiments, the conjugate group does not include a branching group.

[0452] In certain embodiments, a branching group has a structure selected from among:

[chemical structure]

[chemical structure]

[chemical structure]

[0453] wherein each n is, independently, from 1 to 20;
[0454] j is from 1 to 3; and
[0455] m is from 2 to 6.

[0456] In certain embodiments, a branching group has a structure selected from among:

[chemical structure]

[chemical structure]

[0457] wherein each n is, independently, from 1 to 20; and
[0458] m is from 2 to 6.

[0459] In certain embodiments, a branching group has a structure selected from among:

[chemical structure]

[chemical structure]

[chemical structure]

[0460] In certain embodiments, a branching group has a structure selected from among:

[chemical structure]

[0461] wherein each A₁ is independently, O, S, C═O or NH; and each n is, independently, from 1 to 20.

[0462] In certain embodiments, a branching group has a structure selected from among:

[chemical structure]

[0463] wherein each A₁ is independently, O, S, C═O or NH; and
[0464] each n is, independently, from 1 to 20.

[0465] In certain embodiments, a branching group has a structure selected from among:

[chemical structure]

[0466] wherein A₁ is O, S, C═O or NH; and
[0467] each n is, independently, from 1 to 20.

[0468] In certain embodiments, a branching group has a structure selected from among:

[chemical structure]

[0469] In certain embodiments, a branching group has a structure selected from among:

[chemical structure]

[0470] In certain embodiments, a branching group has a structure selected from among:

[chemical structure]

### 2. Certain Tethers

[0471] In certain embodiments, conjugate groups comprise one or more tethers covalently attached to the branching group. In certain embodiments, conjugate groups comprise one or more tethers covalently attached to the linking group. In certain embodiments, each tether is a linear aliphatic group comprising one or more groups selected from alkyl, ether, thioether, disulfide, amide and polyethylene glycol groups in any combination. In certain embodiments, each tether is a linear aliphatic group comprising one or more groups selected from alkyl, substituted alkyl, ether, thioether, disulfide, amide, phosphodiester and polyethylene glycol groups in any combination. In certain embodiments, each tether is a linear aliphatic group comprising one or more groups selected from alkyl, ether and amide groups in any combination. In certain embodiments, each tether is a linear aliphatic group comprising one or more groups selected from alkyl, substituted alkyl, phosphodiester, ether and amide groups in any combination. In certain embodiments, each tether is a linear aliphatic group comprising one or more groups selected from alkyl and phosphodiester in any combination. In certain embodiments, each tether comprises at least one phosphorus linking group or neutral linking group.

[0472] In certain embodiments, the tether includes one or more cleavable bond. In certain embodiments, the tether is attached to the branching group through either an amide or an ether group. In certain embodiments, the tether is attached to the branching group through a phosphodiester group. In certain embodiments, the tether is attached to the branching group through a phosphorus linking group or neutral linking group. In certain embodiments, the tether is attached to the branching group through an ether group. In certain embodiments, the tether is attached to the ligand through either an amide or an ether group. In certain embodiments, the tether is attached to the ligand through an ether group. In certain embodiments, the tether is attached to the ligand through either an amide or an ether group. In certain embodiments, the tether is attached to the ligand through an ether group.

[0473] In certain embodiments, each tether comprises from about 8 to about 20 atoms in chain length between the ligand and the branching group. In certain embodiments, each tether group comprises from about 10 to about 18 atoms in chain length between the ligand and the branching group. In certain embodiments, each tether group comprises about 13 atoms in chain length.

[0474] In certain embodiments, a tether has a structure selected from among:

[chemical structure]

[0475] wherein each n is, independently, from 1 to 20; and
[0476] each p is from 1 to about 6.

[0477] In certain embodiments, a tether has a structure selected from among:

[chemical structure]

[0478] In certain embodiments, a tether has a structure selected from among:

[chemical structure]

[0479] wherein each n is, independently, from 1 to 20.

[0480] In certain embodiments, a tether has a structure selected from among:

[chemical structure]

[0481] wherein L is either a phosphorus linking group or a neutral linking group;
[0482] Z₁ is C(═O)O—R₂;
[0483] Z₂ is H, C₁-C₆ alkyl or substituted C₁-C₆ alky;
[0484] R₂ is H, C₁-C₆ alkyl or substituted C₁-C₆ alky; and
[0485] each m₁ is, independently, from 0 to 20 wherein at least one m₁ is greater than 0 for
[0486] each tether.

[0487] In certain embodiments, a tether has a structure selected from among:

[chemical structure]

[0488] In certain embodiments, a tether has a structure selected from among:

[chemical structure]

[0489] wherein Z₂ is H or CH₃; and
[0490] each m₁ is, independently, from 0 to 20 wherein at least one m₁ is greater than 0 for
[0491] each tether.

[0492] In certain embodiments, a tether has a structure selected from among:

[chemical structure]

[0493] wherein each n is independently, 0, 1, 2, 3, 4, 5, 6, or 7.

[0494] In certain embodiments, a tether comprises a phosphorus linking group. In certain embodiments, a tether does not comprise any amide bonds. In certain embodiments, a tether comprises a phosphorus linking group and does not comprise any amide bonds.

### 3. Certain Ligands

[0495] In certain embodiments, the present disclosure provides ligands wherein each ligand is covalently attached to a tether. In certain embodiments, each ligand is selected to have an affinity for at least one type of receptor on a target cell. In certain embodiments, ligands are selected that have an affinity for at least one type of receptor on the surface of a mammalian liver cell. In certain embodiments, ligands are selected that have an affinity for the hepatic asialoglycoprotein receptor (ASGP-R). In certain embodiments, each ligand is a carbohydrate. In certain embodiments, each ligand is, independently selected from galactose, N-acetyl galactoseamine, mannose, glucose, glucosamone and fucose. In certain embodiments, each ligand is N-acetyl galactoseamine (GalNAc). In certain embodiments, the targeting moiety comprises 2 to 6 ligands. In certain embodiments, the targeting moiety comprises 3 ligands. In certain embodiments, the targeting moiety comprises 3 N-acetyl galactoseamine ligands.

[0496] In certain embodiments, the ligand is a carbohydrate, carbohydrate derivative, modified carbohydrate, multivalent carbohydrate cluster, polysaccharide, modified polysaccharide, or polysaccharide derivative. In certain embodiments, the ligand is an amino sugar or a thio sugar. For example, amino sugars may be selected from any number of compounds known in the art, for example glucosamine, sialic acid, α-D-galactosamine, N-Acetylgalactosamine, 2-acetamido-2-deoxy-D-galactopyranose (GalNAc), 2-Amino-3-O—[(R)-1-carboxyethyl]-2-deoxy-β-D-glucopyranose (β-muramic acid), 2-Deoxy-2-methylamino-L-glucopyranose, 4,6-Dideoxy-4-formamido-2,3-di-O-methyl-D-mannopyranose, 2-Deoxy-2-sulfoamino-D-glucopyranose and N-sulfo-D-glucosamine, and N-Glycoloyl-α-neuraminic acid. For example, thio sugars may be selected from the group consisting of 5-Thio-β-D-glucopyranose, Methyl 2,3,4-tri-O-acetyl-1-thio-6-O-trityl-α-D-glucopyranoside, 4-Thio-β-D-galactopyranose, and ethyl 3,4,6,7-tetra-O-acetyl-2-deoxy-1,5-dithio-α-D-gluco-heptopyranoside.

[0497] In certain embodiments, “GalNac” or “Gal-NAc” refers to 2-(Acetylamino)-2-deoxy-D-galactopyranose, commonly referred to in the literature as N-acetyl galactosamine. In certain embodiments, “N-acetyl galactosamine” refers to 2-(Acetylamino)-2-deoxy-D-galactopyranose. In certain embodiments, “GalNac” or “Gal-NAc” refers to 2-(Acetylamino)-2-deoxy-D-galactopyranose. In certain embodiments, “GalNac” or “Gal-NAc” refers to 2-(Acetylamino)-2-deoxy-D-galactopyranose, which includes both the β-form: 2-(Acetylamino)-2-deoxy-β-D-galactopyranose and α-form: 2-(Acetylamino)-2-deoxy-D-galactopyranose. In certain embodiments, both the β-form: 2-(Acetylamino)-2-deoxy-β-D-galactopyranose and α-form: 2-(Acetylamino)-2-deoxy-D-galactopyranose may be used interchangeably. Accordingly, in structures in which one form is depicted, these structures are intended to include the other form as well. For example, where the structure for an α-form: 2-(Acetylamino)-2-deoxy-D-galactopyranose is shown, this structure is intended to include the other form as well. In certain embodiments, In certain preferred embodiments, the β-form 2-(Acetylamino)-2-deoxy-D-galactopyranose is the preferred embodiment.

[chemical structure]

[0498] In certain embodiments one or more ligand has a structure selected from among:

[chemical structure]

[0499] wherein each R₁ is selected from OH and NHCOOH.

[0500] In certain embodiments one or more ligand has a structure selected from among:

[chemical structure]

[0501] In certain embodiments one or more ligand has a structure selected from among:

[chemical structure]

[0502] In certain embodiments one or more ligand has a structure selected from among:

[chemical structure]

i. Certain Conjugates

[0503] In certain embodiments, conjugate groups comprise the structural features above. In certain such embodiments, conjugate groups have the following structure:

[chemical structure]

[0504] wherein each n is, independently, from 1 to 20.

[0505] In certain such embodiments, conjugate groups have the following structure:

[chemical structure]

[0506] In certain such embodiments, conjugate groups have the following structure:

[chemical structure]

[0507] wherein each n is, independently, from 1 to 20;
[0508] Z is H or a linked solid support;
[0509] Q is an antisense compound;
[0510] X is O or S; and
[0511] Bx is a heterocyclic base moiety.

[0512] In certain such embodiments, conjugate groups have the following structure:

[chemical structure]

[0513] In certain such embodiments, conjugate groups have the following structure:

[chemical structure]

[0514] In certain such embodiments, conjugate groups have the following structure:

[chemical structure]

[0515] In certain such embodiments, conjugate groups have the following structure:

[chemical structure]

[0516] In certain such embodiments, conjugate groups have the following structure:

[chemical structure]

[0517] In certain such embodiments, conjugate groups have the following structure:

[chemical structure]

[0518] In certain such embodiments, conjugate groups have the following structure:

[chemical structure]

[0519] In certain such embodiments, conjugate groups have the following structure:

[chemical structure]

[0520] In certain embodiments, conjugates do not comprise a pyrrolidine.

[0521] In certain such embodiments, conjugate groups have the following structure:

[chemical structure]

[0522] In certain such embodiments, conjugate groups have the following structure:

[chemical structure]

[0523] In certain such embodiments, conjugate groups have the following structure:

[chemical structure]

[0524] In certain such embodiments, conjugate groups have the following structure:

[chemical structure]

[0525] In certain such embodiments, conjugate groups have the following structure:

[chemical structure]

[0526] In certain such embodiments, conjugate groups have the following structure:

[chemical structure]

[0527] In certain such embodiments, conjugate groups have the following structure:

[chemical structure]

[0528] In certain such embodiments, conjugate groups have the following structure:

[chemical structure]

[0529] In certain such embodiments, conjugate groups have the following structure:

[chemical structure]

[0530] In certain such embodiments, conjugate groups have the following structure:

[chemical structure]

[0531] In certain such embodiments, conjugate groups have the following structure:

[chemical structure]

[chemical structure]

[0532] wherein X is a substituted or unsubstituted tether of six to eleven consecutively bonded atoms.

[0533] In certain embodiments, the cell-targeting moiety of the conjugate group has the following structure:

[chemical structure]

[0534] wherein X is a substituted or unsubstituted tether of ten consecutively bonded atoms.

[0535] In certain embodiments, the cell-targeting moiety of the conjugate group has the following structure:

[chemical structure]

[0536] wherein X is a substituted or unsubstituted tether of four to eleven consecutively bonded atoms and wherein the tether comprises exactly one amide bond.

[0537] In certain such embodiments, the cell-targeting moiety of the conjugate group has the following structure:

[chemical structure]

[0538] wherein Y and Z are independently selected from a C₁-C₁₂ substituted or unsubstituted alkyl, alkenyl, or alkynyl group, or a group comprising an ether, a ketone, an amide, an ester, a carbamate, an amine, a piperidine, a phosphate, a phosphodiester, a phosphorothioate, a triazole, a pyrrolidine, a disulfide, or a thioether.

[0539] In certain such embodiments, the cell-targeting moiety of the conjugate group has the following structure:

[chemical structure]

[0540] wherein Y and Z are independently selected from a C₁-C₁₂ substituted or unsubstituted alkyl group, or a group comprising exactly one ether or exactly two ethers, an amide, an amine, a piperidine, a phosphate, a phosphodiester, or a phosphorothioate.

[0541] In certain such embodiments, the cell-targeting moiety of the conjugate group has the following structure:

[chemical structure]

[0542] wherein Y and Z are independently selected from a C₁-C₁₂ substituted or unsubstituted alkyl group.

[0543] In certain such embodiments, the cell-targeting moiety of the conjugate group has the following structure:

[chemical structure]

[0544] wherein m and n are independently selected from 1, 2, 3, 4, 5, 6, 7, 8, 9, 10, 11, and 12.

[0545] In certain such embodiments, the cell-targeting moiety of the conjugate group has the following structure:

[chemical structure]

[0546] wherein m is 4, 5, 6, 7, or 8, and n is 1, 2, 3, or 4.

[0547] In certain such embodiments, the cell-targeting moiety of the conjugate group has the following structure:

[chemical structure]

[0548] wherein X is a substituted or unsubstituted tether of four to thirteen consecutively bonded atoms, and wherein X does not comprise an ether group.

[0549] In certain embodiments, the cell-targeting moiety of the conjugate group has the following structure:

[chemical structure]

[0550] wherein X is a substituted or unsubstituted tether of eight consecutively bonded atoms, and wherein X does not comprise an ether group.

[0551] In certain embodiments, the cell-targeting moiety of the conjugate group has the following structure:

[chemical structure]

[0552] wherein X is a substituted or unsubstituted tether of four to thirteen consecutively bonded atoms, and wherein the tether comprises exactly one amide bond, and wherein X does not comprise an ether group.

[chemical structure]

[0553] wherein X is a substituted or unsubstituted tether of four to thirteen consecutively bonded atoms and wherein the tether consists of an amide bond and a substituted or unsubstituted C₂-C₁₁ alkyl group.

[0554] In certain embodiments, the cell-targeting moiety of the conjugate group has the following structure:

[chemical structure]

[0555] wherein Y is selected from a C₁-C₁₂ substituted or unsubstituted alkyl, alkenyl, or alkynyl group, or a group comprising an ether, a ketone, an amide, an ester, a carbamate, an amine, a piperidine, a phosphate, a phosphodiester, a phosphorothioate, a triazole, a pyrrolidine, a disulfide, or a thioether.

[0556] In certain such embodiments, the cell-targeting moiety of the conjugate group has the following structure:

[chemical structure]

[0557] wherein Y is selected from a C₁-C₁₂ substituted or unsubstituted alkyl group, or a group comprising an ether, an amine, a piperidine, a phosphate, a phosphodiester, or a phosphorothioate.

[0558] In certain such embodiments, the cell-targeting moiety of the conjugate group has the following structure:

[chemical structure]

[0559] wherein Y is selected from a C₁-C₁₂ substituted or unsubstituted alkyl group.

[0560] In certain such embodiments, the cell-targeting moiety of the conjugate group has the following structure:

[chemical structure]

[0561] Wherein n is 1, 2, 3, 4, 5, 6, 7, 8, 9, 10, 11, or 12.

[0562] In certain such embodiments, the cell-targeting moiety of the conjugate group has the following structure:

[chemical structure]

[0563] wherein n is 4, 5, 6, 7, or 8.

### a Certain Conjugated Antisense Compounds

[0564] In certain embodiments, the conjugates are bound to a nucleoside of the antisense oligonucleotide at the 2′, 3′, of 5′ position of the nucleoside. In certain embodiments, a conjugated antisense compound has the following structure:

[chemical structure]

[0565] wherein
[0566] A is the antisense oligonucleotide;
[0567] B is the cleavable moiety
[0568] C is the conjugate linker
[0569] D is the branching group
[0570] each E is a tether;
[0571] each F is a ligand; and
[0572] q is an integer between 1 and 5.

[0573] In certain embodiments, a conjugated antisense compound has the following structure:

[chemical structure]

[0574] wherein
[0575] A is the antisense oligonucleotide;
[0576] C is the conjugate linker
[0577] D is the branching group
[0578] each E is a tether;
[0579] each F is a ligand; and
[0580] q is an integer between 1 and 5.

[0581] In certain such embodiments, the conjugate linker comprises at least one cleavable bond.

[0582] In certain such embodiments, the branching group comprises at least one cleavable bond.

[0583] In certain embodiments each tether comprises at least one cleavable bond.

[0584] In certain embodiments, the conjugates are bound to a nucleoside of the antisense oligonucleotide at the 2′, 3′, of 5′ position of the nucleoside.

[0585] In certain embodiments, a conjugated antisense compound has the following structure:

[chemical structure]

[0586] wherein
[0587] A is the antisense oligonucleotide;
[0588] B is the cleavable moiety
[0589] C is the conjugate linker
[0590] each E is a tether;
[0591] each F is a ligand; and
[0592] q is an integer between 1 and 5.

[0593] In certain embodiments, the conjugates are bound to a nucleoside of the antisense oligonucleotide at the 2′, 3′, of 5′ position of the nucleoside. In certain embodiments, a conjugated antisense compound has the following structure:

[chemical structure]

[0594] wherein
[0595] A is the antisense oligonucleotide;
[0596] C is the conjugate linker
[0597] each E is a tether;
[0598] each F is a ligand; and
[0599] q is an integer between 1 and 5.

[0600] In certain embodiments, a conjugated antisense compound has the following structure:

[chemical structure]

[0601] wherein
[0602] A is the antisense oligonucleotide;
[0603] B is the cleavable moiety
[0604] D is the branching group
[0605] each E is a tether;
[0606] each F is a ligand; and
[0607] q is an integer between 1 and 5.

[0608] In certain embodiments, a conjugated antisense compound has the following structure:

[chemical structure]

[0609] wherein
[0610] A is the antisense oligonucleotide;
[0611] D is the branching group
[0612] each E is a tether;
[0613] each F is a ligand; and
[0614] q is an integer between 1 and 5.

[0615] In certain such embodiments, the conjugate linker comprises at least one cleavable bond.

[0616] In certain embodiments each tether comprises at least one cleavable bond.

[0617] In certain embodiments, a conjugated antisense compound has a structure selected from among the following:

[chemical structure]

[0618] In certain embodiments, a conjugated antisense compound has a structure selected from among the following:

[chemical structure]

[0619] In certain embodiments, a conjugated antisense compound has a structure selected from among the following:

[chemical structure]

[0620] Representative United States patents, United States patent application publications, and international patent application publications that teach the preparation of certain of the above noted conjugates, conjugated antisense compounds, tethers, linkers, branching groups, ligands, cleavable moieties as well as other modifications include without limitation, U.S. Pat. Nos. 5,994,517, 6,300,319, 6,660,720, 6,906,182, 7,262,177, 7,491,805, 8,106,022, 7,723,509, US 2006/0148740, US 2011/0123520, WO 2013/033230 and WO 2012/037254, each of which is incorporated by reference herein in its entirety.

[0621] Representative publications that teach the preparation of certain of the above noted conjugates, conjugated antisense compounds, tethers, linkers, branching groups, ligands, cleavable moieties as well as other modifications include without limitation, BIESSEN et al., “The Cholesterol Derivative of a Triantennary Galactoside with High Affinity for the Hepatic Asialoglycoprotein Receptor: a Potent Cholesterol Lowering Agent” J. Med. Chem. (1995) 38:1846-1852, BIESSEN et al., “Synthesis of Cluster Galactosides with High Affinity for the Hepatic Asialoglycoprotein Receptor” J. Med. Chem. (1995) 38:1538-1546, LEE et al., “New and more efficient multivalent glyco-ligands for asialoglycoprotein receptor of mammalian hepatocytes” Bioorganic & Medicinal Chemistry (2011) 19:2494-2500, RENSEN et al., “Determination of the Upper Size Limit for Uptake and Processing of Ligands by the Asialoglycoprotein Receptor on Hepatocytes in Vitro and in Vivo” J. Biol. Chem. (2001) 276(40):37577-37584, RENSEN et al., “Design and Synthesis of Novel N-Acetylgalactosamine-Terminated Glycolipids for Targeting of Lipoproteins to the Hepatic Asialoglycoprotein Receptor” J. Med. Chem. (2004) 47:5798-5808, SLIEDREGT et al., “Design and Synthesis of Novel Amphiphilic Dendritic Galactosides for Selective Targeting of Liposomes to the Hepatic Asialoglycoprotein Receptor” J. Med. Chem. (1999) 42:609-618, and Valentijn et al., “Solid-phase synthesis of lysine-based cluster galactosides with high affinity for the Asialoglycoprotein Receptor” Tetrahedron, 1997, 53(2), 759-770, each of which is incorporated by reference herein in its entirety.

[0622] In certain embodiments, conjugated antisense compounds comprise an RNase H based oligonucleotide (such as a gapmer) or a splice modulating oligonucleotide (such as a fully modified oligonucleotide) and any conjugate group comprising at least one, two, or three GalNAc groups. In certain embodiments a conjugated antisense compound comprises any conjugate group found in any of the following references: Lee, Carbohydr Res, 1978, 67, 509-514; Connolly et al., J Biol Chem, 1982, 257, 939-945; Pavia et al., Int J Pep Protein Res, 1983, 22, 539-548; Lee et al., Biochem, 1984, 23, 4255-4261; Lee et al., Glycoconjugate J, 1987, 4, 317-328; Toyokuni et al., Tetrahedron Lett, 1990, 31, 2673-2676; Biessen et al., J Med Chem, 1995, 38, 1538-1546; Valentijn et al., Tetrahedron, 1997, 53, 759-770; Kim et al., Tetrahedron Lett, 1997, 38, 3487-3490; Lee et al., Bioconjug Chem, 1997, 8, 762-765; Kato et al., Glycobiol, 2001, 11, 821-829; Rensen et al., J Biol Chem, 2001, 276, 37577-37584; Lee et al., Methods Enzymol, 2003, 362, 38-43; Westerlind et al., Glycoconj J, 2004, 21, 227-241; Lee et al., Bioorg Med Chem Lett, 2006, 16(19), 5132-5135; Maierhofer et al., Bioorg Med Chem, 2007, 15, 7661-7676; Khorev et al., Bioorg Med Chem, 2008, 16, 5216-5231; Lee et al., Bioorg Med Chem, 2011, 19, 2494-2500; Kornilova et al., Analyt Biochem, 2012, 425, 43-46; Pujol et al., Angew Chemie Int Ed Engl, 2012, 51, 7445-7448; Biessen et al., J Med Chem, 1995, 38, 1846-1852; Sliedregt et al., J Med Chem, 1999, 42, 609-618; Rensen et al., J Med Chem, 2004, 47, 5798-5808; Rensen et al., Arterioscler Thromb Vasc Biol, 2006, 26, 169-175; van Rossenberg et al., Gene Ther, 2004, 11, 457-464; Sato et al., J Am Chem Soc, 2004, 126, 14013-14022; Lee et al., J Org Chem, 2012, 77, 7564-7571; Biessen et al., FASEB J, 2000, 14, 1784-1792; Rajur et al., Bioconjug Chem, 1997, 8, 935-940; Duff et al., Methods Enzymol, 2000, 313, 297-321; Maier et al., Bioconjug Chem, 2003, 14, 18-29; Jayaprakash et al., Org Lett, 2010, 12, 5410-5413; Manoharan, Antisense Nucleic Acid Drug Dev, 2002, 12, 103-128; Merwin et al., Bioconjug Chem, 1994, 5, 612-620; Tomiya et al., Bioorg Med Chem, 2013, 21, 5275-5281; International applications WO1998/013381; WO2011/038356; WO1997/046098; WO2008/098788; WO2004/101619; WO2012/037254; WO2011/120053; WO2011/100131; WO2011/163121; WO2012/177947; WO2013/033230; WO2013/075035; WO2012/083185; WO2012/083046; WO2009/082607; WO2009/134487; WO2010/144740; WO2010/148013; WO1997/020563; WO2010/088537; WO2002/043771; WO2010/129709; WO2012/068187; WO2009/126933; WO2004/024757; WO2010/054406; WO2012/089352; WO2012/089602; WO2013/166121; WO2013/165816; U.S. Pat. Nos. 4,751,219; 8,552,163; 6,908,903; 7,262,177; 5,994,517; 6,300,319; 8,106,022; 7,491,805; 7,491,805; 7,582,744; 8,137,695; 6,383,812; 6,525,031; 6,660,720; 7,723,509; 8,541,548; 8,344,125; 8,313,772; 8,349,308; 8,450,467; 8,501,930; 8,158,601; 7,262,177; 6,906,182; 6,620,916; 8,435,491; 8,404,862; 7,851,615; Published U.S. Patent Application Publications US2011/0097264; US2011/0097265; US2013/0004427; US2005/0164235; US2006/0148740; US2008/0281044; US2010/0240730; US2003/0119724; US2006/0183886; US2008/0206869; US2011/0269814; US2009/0286973; US2011/0207799; US2012/0136042; US2012/0165393; US2008/0281041; US2009/0203135; US2012/0035115; US2012/0095075; US2012/0101148; US2012/0128760; US2012/0157509; US2012/0230938; US2013/0109817; US2013/0121954; US2013/0178512; US2013/0236968; US2011/0123520; US2003/0077829; US2008/0108801; and US2009/0203132; each of which is incorporated by reference in its entirety.

### Cell Culture and Antisense Compounds Treatment

[0623] The effects of antisense compounds on the level, activity, or expression of PKK nucleic acids can be tested in vitro in a variety of cell types. Cell types used for such analyses are available from commercial vendors (e.g., American Type Culture Collection, Manassas, VA; Zen-Bio, Inc., Research Triangle Park, NC; Clonetics Corporation, Walkersville, MD) and are cultured according to the vendor's instructions using commercially available reagents (e.g., Life Technologies, Carlsbad, CA). Illustrative cell types include, but are not limited to, HepaRG™ T cells and mouse primary hepatocytes.

### In Vitro Testing of Antisense Oligonucleotides

[0624] Described herein are methods for treatment of cells with antisense oligonucleotides, which can be modified appropriately for treatment with other antisense compounds.

[0625] Cells may be treated with antisense oligonucleotides when the cells reach approximately 60-80% confluency in culture.

[0626] One reagent commonly used to introduce antisense oligonucleotides into cultured cells includes the cationic lipid transfection reagent LIPOFECTIN (Life Technologies, Carlsbad, CA). Antisense oligonucleotides may be mixed with LIPOFECTIN in OPTI-MEM 1 (Life Technologies, Carlsbad, CA) to achieve the desired final concentration of antisense oligonucleotide and a LIPOFECTIN concentration that may range from 2 to 12 μg/mL per 100 nM antisense oligonucleotide.

[0627] Another reagent used to introduce antisense oligonucleotides into cultured cells includes LIPOFECTAMINE (Life Technologies, Carlsbad, CA). Antisense oligonucleotide is mixed with LIPOFECTAMINE in OPTI-MEM 1 reduced serum medium (Life Technologies, Carlsbad, CA) to achieve the desired concentration of antisense oligonucleotide and a LIPOFECTAMINE concentration that may range from 2 to 12 μg/mL per 100 nM antisense oligonucleotide.

[0628] Another technique used to introduce antisense oligonucleotides into cultured cells includes electroporation.

[0629] Yet another technique used to introduce antisense oligonucleotides into cultured cells includes free uptake of the oligonucleotides by the cells.

[0630] Cells are treated with antisense oligonucleotides by routine methods. Cells may be harvested 16-24 hours after antisense oligonucleotide treatment, at which time RNA or protein levels of target nucleic acids are measured by methods known in the art and described herein. In general, when treatments are performed in multiple replicates, the data are presented as the average of the replicate treatments. The concentration of antisense oligonucleotide used varies from cell line to cell line. Methods to determine the optimal antisense oligonucleotide concentration for a particular cell line are well known in the art. Antisense oligonucleotides are typically used at concentrations ranging from 1 nM to 300 nM when transfected with LIPOFECTAMINE. Antisense oligonucleotides are used at higher concentrations ranging from 625 to 20,000 nM when transfected using electroporation.

### RNA Isolation

[0631] RNA analysis can be performed on total cellular RNA or poly(A)+mRNA. Methods of RNA isolation are well known in the art. RNA is prepared using methods well known in the art, for example, using the TRIZOL Reagent (Life Technologies, Carlsbad, CA) according to the manufacturer's recommended protocols.

### Analysis of Inhibition of Target Levels or Expression

[0632] Inhibition of levels or expression of a PKK nucleic acid can be assayed in a variety of ways known in the art. For example, target nucleic acid levels can be quantitated by, e.g., Northern blot analysis, competitive polymerase chain reaction (PCR), or quantitative real-time PCR. RNA analysis can be performed on total cellular RNA or poly(A)+mRNA. Methods of RNA isolation are well known in the art. Northern blot analysis is also routine in the art. Quantitative real-time PCR can be conveniently accomplished using the commercially available ABI PRISM 7600, 7700, or 7900 Sequence Detection System, available from PE-Applied Biosystems, Foster City, CA and used according to manufacturer's instructions.

### Quantitative Real-Time PCR Analysis of Target RNA Levels

[0633] Quantitation of target RNA levels may be accomplished by quantitative real-time PCR using the ABI PRISM 7600, 7700, or 7900 Sequence Detection System (PE-Applied Biosystems, Foster City, CA) according to manufacturer's instructions. Methods of quantitative real-time PCR are well known in the art. Prior to real-time PCR, the isolated RNA is subjected to a reverse transcriptase (RT) reaction, which produces complementary DNA (cDNA) that is then used as the substrate for the real-time PCR amplification. The RT and real-time PCR reactions are performed sequentially in the same sample well. RT and real-time PCR reagents may be obtained from Life Technologies (Carlsbad, CA). RT real-time-PCR reactions are carried out by methods well known to those skilled in the art. Gene (or RNA) target quantities obtained by real time PCR are normalized using either the expression level of a gene whose expression is constant, such as cyclophilin A, or by quantifying total RNA using RIBOGREEN (Life Technologies, Inc. Carlsbad, CA). Cyclophilin A expression is quantified by real time PCR, by being run simultaneously with the target, multiplexing, or separately. Total RNA is quantified using RIBOGREEN RNA quantification reagent (Invetrogen, Inc. Eugene, OR). Methods of RNA quantification by RIBOGREEN are taught in Jones, L. J., et al, (Analytical Biochemistry, 1998, 265, 368-374). A CYTOFLUOR 4000 instrument (PE Applied Biosystems) is used to measure RIBOGREEN fluorescence.

[0634] Probes and primers are designed to hybridize to a PKK nucleic acid. Methods for designing real-time PCR probes and primers are well known in the art, and may include the use of software such as PRIMER EXPRESS Software (Applied Biosystems, Foster City, CA).

### Analysis of Protein Levels

[0635] Antisense inhibition of PKK nucleic acids can be assessed by measuring PKK protein levels. Protein levels of PKK can be evaluated or quantitated in a variety of ways well known in the art, such as immunoprecipitation, Western blot analysis (immunoblotting), enzyme-linked immunosorbent assay (ELISA), quantitative protein assays, protein activity assays (for example, caspase activity assays), immunohistochemistry, immunocytochemistry or fluorescence-activated cell sorting (FACS). Antibodies directed to a target can be identified and obtained from a variety of sources, such as the MSRS catalog of antibodies (Aerie Corporation, Birmingham, MI), or can be prepared via conventional monoclonal or polyclonal antibody generation methods well known in the art.

### In Vivo Testing of Antisense Compounds

[0636] Antisense compounds, for example, antisense oligonucleotides, are tested in animals to assess their ability to inhibit expression of PKK and produce phenotypic changes.

[0637] In certain embodiments, such phenotypic changes include those associated with an inflammatory disease, such as, reduced inflammation, edema/swelling, vascular permeability, and vascular leakage. In certain embodiments, inflammation is measured by measuring the increase or decrease of edema, temperature, pain, color of tissue, and abdominal function in the animal.

[0638] In certain embodiments, such phenotypic changes include those associated with a thromboembolic disease, such as, prolonged aPTT, prolonged aPTT time in conjunction with a normal PT, decreased quantity of Platelet Factor 4 (PF-4), and reduced formation of thrombus or increased time for thrombus formation.

[0639] Testing may be performed in normal animals, or in experimental disease models. For administration to animals, antisense oligonucleotides are formulated in a pharmaceutically acceptable diluent, such as phosphate-buffered saline. Administration includes parenteral routes of administration, such as intraperitoneal, intravenous, and subcutaneous. Calculation of antisense oligonucleotide dosage and dosing frequency is within the abilities of those skilled in the art, and depends upon factors such as route of administration and animal body weight. Following a period of treatment with antisense oligonucleotides, RNA is isolated from liver tissue and changes in PKK nucleic acid expression are measured.

### Certain Indications

[0640] In certain embodiments, the invention provides methods of treating an individual comprising administering one or more pharmaceutical compositions as described herein.

[0641] In certain embodiments, the individual has an inflammatory disease. In certain embodiments, the individual is at risk for developing an inflammatory condition, including, but not limited to hereditary angioedema (HAE), edema, angioedema, swelling, angioedema of the lids, ocular edema, macular edema, and cerebral edema. This includes individuals with an acquired problem, disease, or disorder that leads to a risk of inflammation, for example, genetic predisposition to an inflammatory condition, environmental factors, and exposure to certain medications, including, for example, ACE inhibitors and ARBs. In certain embodiments, the individual has been identified as in need of anti-inflammation therapy. Examples of such individuals include, but are not limited to those having a mutation in the genetic code for complement 1 esterase inhibitor (i.e., C1-INH) or Factor 12. In certain embodiments, an abnormal code can lead to a deficiency in C1-INH (i.e., type I HAE), an inability of existing C1-INH to function properly (type II HAE), or hyperfunctional Factor 12 (i.e., type III HAE).

[0642] In certain embodiments, the individual has a thromboembolic disease. In certain embodiments, the individual is at risk for a blood clotting disorder, including, but not limited to, infarct, thrombosis, embolism, thromboembolism such as deep vein thrombosis, pulmonary embolism, myocardial infarction, and stroke. This includes individuals with an acquired problem, disease, or disorder that leads to a risk of thrombosis, for example, surgery, cancer, immobility, sepsis, atherosclerosis atrial fibrillation, as well as genetic predisposition, for example, antiphospholipid syndrome and the autosomal dominant condition, Factor V Leiden. In certain embodiments, the individual has been identified as in need of anticoagulation therapy. Examples of such individuals include, but are not limited to, those undergoing major orthopedic surgery (e.g., hip/knee replacement or hip fracture surgery) and patients in need of chronic treatment, such as those suffering from arterial fibrillation to prevent stroke.

[0643] In certain embodiments the invention provides methods for prophylactically reducing PKK expression in an individual. Certain embodiments include treating an individual in need thereof by administering to an individual a therapeutically effective amount of an antisense compound targeted to a PKK nucleic acid.

[0644] In one embodiment, administration of a therapeutically effective amount of an antisense compound targeted to a PKK nucleic acid is accompanied by monitoring of PKK levels in the serum of an individual, to determine an individual's response to administration of the antisense compound. An individual's response to administration of the antisense compound is used by a physician to determine the amount and duration of therapeutic intervention.

[0645] In certain embodiments, administration of an antisense compound targeted to a PKK nucleic acid results in reduction of PKK expression by at least 15, 20, 25, 30, 35, 40, 45, 50, 51, 52, 53, 54, 55, 56, 57, 58, 59, 60, 61, 62, 63, 64, 65, 66, 67, 68, 69, 70, 71, 72, 73, 74, 75, 76, 77, 78, 79, 80, 81, 82, 83, 84, 85, 86, 87, 88, 89, 90, 91, 92, 93, 94, 95, 96, 97, 98, or 99%, or a range defined by any two of these values. In certain embodiments, pharmaceutical compositions comprising an antisense compound targeted to PKK are used for the preparation of a medicament for treating a patient suffering or susceptible to an inflammatory disease or thromboembolic disease.

### Certain Compositions

### 1. ISIS 546254

[0646] In certain embodiments, ISIS 546254 is characterized as a 5-10-5 MOE gapmer, having a sequence of (from 5′ to 3′) TGCAAGTCTCTTGGCAAACA (incorporated herein as SEQ ID NO: 570), wherein each internucleoside linkage is a phosphorothioate linkage, each cytosine is a 5′-methylcytosine, each of nucleosides 1-5 and 16-20 are 2′-O-methoxyethyl modified nucleosides, and each of nucleosides 6-15 are 2′-deoxynucleosides.

[0647] In certain embodiments, ISIS 546254 is described by the following chemical notation: Tes Ges mCes Aes Aes Gds Tds mCds Tds mCds Tds Tds Gds Gds mCds Aes Aes Aes mCes Ae (incorporated herein as SEQ ID NO: 2282); wherein,
[0648] A=an adenine,
[0649] mC=a 5′-methylcytosine
[0650] G=a guanine,
[0651] T=a thymine,
[0652] e=a 2′-O-methoxyethyl modified nucleoside,
[0653] d=a 2′-deoxynucleoside, and
[0654] s=a phosphorothioate internucleoside linkage.

[0655] In certain embodiments, ISIS 546254 is described by the following chemical structure:

[chemical structure]

### Structure 1. ISIS 546254

[0656] In certain embodiments, as provided in Example 2 (hereinbelow), ISIS 546254 achieved 95% inhibition of human PKK mRNA in cultured HepaRG™ cells (density of 20,000 cells per well) when transfected using electroporation with 5,000 nM antisense oligonucleotide after a treatment period of 24 hours and measured by quantitative real-time PCR using human primer probe set RTS3454 and adjusted according to total RNA content, as measured by RIBOGREEN®.

[0657] In certain embodiments, as provided in Example 5 (see Tables 34 and 41 hereinbelow), ISIS 546254 achieved an IC₅₀ of 0.2 μM and 0.3 μM in a 4 point dose response curve (0.19 μM, 0.56 μM, 1.67 μM, and 5.0 μM) in cultured HepaRG™ cells (density of 20,000 cells per well) when transfected using electroporation after a treatment period of 16 and measured by quantitative real-time PCR using human primer probe set RTS3454 and adjusted according to total RNA content, as measured by RIBOGREEN®.

[0658] In certain embodiments, as provided in Example 7 (hereinbelow), ISIS 546254 achieved 31%, 55%, 84%, and 83% human PKK mRNA inhibition and 0%, 36%, 51%, and 76% human PKK protein inhibition in transgenic mice harboring the human PKK gene sequence when injected subcutaneously twice a week for 3 weeks with 2.5 mg/kg/week, 5.0 mg/kg/week, 10 mg/kg/week or 20 mg/kg/week with ISIS 546254.

[0659] In certain embodiments, as provided in Example 8 (hereinbelow), ISISI 546254 is effective for inhibiting PKK mRNA and protein expression and is tolerable in primates.

### 2. ISIS 546343

[0660] In certain embodiments, ISIS 546343 is characterized as a 5-10-5 MOE gapmer, having a sequence of (from 5′ to 3′) CCCCCTTCTTTATAGCCAGC (incorporated herein as SEQ ID NO: 705), wherein each internucleoside linkage is a phosphorothioate linkage, each cytosine is a 5′-methylcytosine, each of nucleosides 1-5 and 16-20 are 2′-O-methoxyethyl modified nucleosides, and each of nucleosides 6-15 are 2′-deoxynucleosides.

[0661] In certain embodiments, ISIS 546343 is described by the following chemical notation: mCes mCes mCes mCes mCes Tds Tds mCds Tds Tds Tds Ads Tds Ads Gds mCes mCes Aes Ges mCe; wherein,
[0662] A=an adenine,
[0663] mC=a 5′-methylcytosine;
[0664] G=a guanine,
[0665] T=a thymine,
[0666] e=a 2′-O-methoxyethyl modified nucleoside,
[0667] d=a 2′-deoxynucleoside, and
[0668] s=a phosphorothioate internucleoside linkage.

[0669] In certain embodiments, ISIS 546343 is described by the following chemical structure:

[chemical structure]

### Structure 2. ISIS 546343

[0670] In certain embodiments, as provided in Example 2 (see Tables 9 and 10 hereinbelow), ISIS 546343 achieved 97% and 91% human PKK mRNA inhibition in cultured HepaRG™ cells (density of 20,000 cells per well) when transfected using electroporation with 5,000 nM antisense oligonucleotide after a treatment period of 24 hours and measured by quantitative real-time PCR using human primer probe set RTS3454 and adjusted according to total RNA content, as measured by RIBOGREEN®.

[0671] In certain embodiments, as provided twice in Example 5 (see Tables 34 and 41 hereinbelow), ISIS 546343 achieved an IC₅₀ of 0.4 μM in a 4 point dose response curve (0.19 μM, 0.56 μM, 1.67 μM, and 5.0 μM) in cultured HepaRG™ cells (density of 20,000 cells per well) when transfected using electroporation after a treatment period of 16 and measured by quantitative real-time PCR using human primer probe set RTS3454 and adjusted according to total RNA content, as measured by RIBOGREEN®.

[0672] In certain embodiments, as provided in Example 7 (hereinbelow), ISIS 546343 achieved 46%, 66%, and 86% human PKK mRNA inhibition and 0%, 38%, and 79% human PKK protein inhibition in transgenic mice harboring the human PKK gene sequence when injected subcutaneously twice a week for 3 weeks with 2.5 mg/kg/week, 5.0 mg/kg/week, 10 mg/kg/week or 20 mg/kg/week with ISIS 546343.

[0673] In certain embodiments, as provided in Example 8 (hereinbelow), ISISI 546343 is effective for inhibiting PKK mRNA and protein expression and is tolerable in primates.

### 3. ISIS 548048

[0674] In certain embodiments, ISIS 548048 is characterized as a modified antisense oligonucleotide having the nucleobase sequence (from 5′ to 3′) CGATATCATGATTCCC (incorporated herein as SEQ ID NO: 1666), consisting of a combination of sixteen 2′-deoxynucleosides, 2′-O-methoxyethyl modified nucleosides, and cEt modified nucleosides, wherein each of nucleosides 1, 2, and 16 are 2′-O-methoxyethyl modified nucleosides, wherein each of nucleosides 3, 14, and 15 are cEt modified nucleosides, wherein each of nucleosides 4-13 are 2′-deoxynucleosides, wherein each internucleoside linkage is a phosphorothioate internucleoside linkage, and wherein each cytosine is a 5′-methylcytosine.

[0675] In certain embodiments, ISIS 548048 is described by the following chemical notation: mCes Ges Aks Tds Ads Tds mCds Ads Tds Gds Ads Tds Tds mCks mCks mCe; wherein,
[0676] A=an adenine,
[0677] mC=a 5′-methylcytosine;
[0678] G=a guanine,
[0679] T=a thymine,
[0680] e=a 2′-O-methoxyethyl modified nucleoside,
[0681] k=a cEt modified nucleoside,
[0682] d=a 2′-deoxynucleoside, and
[0683] s=a phosphorothioate internucleoside linkage.

[0684] In certain embodiments, ISIS 548048 is described by the following chemical structure:

[chemical structure]

### Structure 3. ISIS 548048

[0685] In certain embodiments, as provided in Example 3 (hereinbelow), ISIS 548048 achieved 84% mRNA inhibition in cultured HepaRG™ cells (density of 20,000 cells per well) when transfected using electroporation with 1,000 nM antisense oligonucleotide after a treatment period of 24 hours and measured by quantitative real-time PCR using human primer probe set RTS3454 and adjusted according to total RNA content, as measured by RIBOGREEN®.

[0686] In certain embodiments, as provided in Example 6 (hereinbelow), ISIS 548048 achieved an IC₅₀ of 0.1 μM in a 4 point dose response curve (0.11 μM, 0.33 μM, 1.00 μM, and 3.00 μM) in cultured HepaRG™ cells (density of 20,000 cells per well) when transfected using electroporation after a treatment period of 16 and measured by quantitative real-time PCR using human primer probe set RTS3454 and adjusted according to total RNA content, as measured by RIBOGREEN®.

[0687] In certain embodiments, as provided in Example 7 (hereinbelow), ISIS 548048 achieved 7%, 77%, 72% and 80% human PKK mRNA inhibition and 23%, 70%, 89%, and 98% human PKK protein inhibition in transgenic mice harboring the human PKK gene sequence when injected subcutaneously twice a week for 3 weeks with 2.5 mg/kg/week, 5.0 mg/kg/week, 10 mg/kg/week or 20 mg/kg/week with ISIS 548048.

[0688] In certain embodiments, as provided in Example 8 (hereinbelow), ISISI 548048 is effective for inhibiting PKK mRNA and protein expression and is tolerable in primates.

### 4. ISIS 721744

[0689] In certain embodiments, ISIS 721744 is characterized as a 5-10-5 MOE gapmer, having a sequence of (from 5′ to 3′) TGCAAGTCTCTTGGCAAACA (incorporated herein as SEQ ID NO: 570), wherein the internucleoside linkages between nucleosides 3 to 4, 4 to 5, 16 to 17, and 17 to 18 are phosphodiester linkages and the internucleoside linkages between nucleosides 1 to 2, 2 to 3, 5 to 6, 6 to 7, 7 to 8, 8 to 9, 9 to 10, 10 to 11, 11 to 12, 12 to 13, 13 to 14, 14 to 15, 15 to 16, 18 to 19, and 19 to 20 are phosphorothioate linkages, each cytosine is a 5′-methylcytosine, each of nucleosides 1-5 and 16-20 are 2′-O-methoxyethyl modified nucleosides, and each of nucleosides 6-15 are 2′-deoxynucleosides.

[0690] In certain embodiments, ISIS 721744 is described by the following chemical notation: GalNAc3-7_{a-o′}Tes Ges mCeo Aeo Aes Gds Tds mCds Tds mCds Tds Tds Gds Gds mCds Aeo Aeo Aes mCes Ae (incorporated herein as SEQ ID NO: 2283); wherein,
[0691] A=an adenine,
[0692] mC=a 5′-methylcytosine
[0693] G=a guanine,
[0694] T=a thymine,
[0695] e=a 2′-O-methoxyethyl modified nucleoside,
[0696] d=a 2′-deoxynucleoside,
[0697] o=a phosphodiester internucleoside linkage,
[0698] s=a phosphorothioate internucleoside linkage, and
[0699] GalNAc3-7_{a-o′}=

[chemical structure]

[0700] In certain embodiments, ISIS 721744 is described by the following chemical structure:

[chemical structure]

### Certain Hotspot Regions

### 1. Nucleobases 27427-27466 of SEQ ID NO: 10

[0701] In certain embodiments, antisense oligonucletoides are designed to target nucleobases 27427-27466 of SEQ ID NO: 10 (GENBANK Accession No. NT_016354.19 truncated from nucleobases 111693001 to 111730000). In certain embodiments, nucleobases 27427-27466 of SEQ ID NO: 10 are a hotspot region. In certain embodiments, nucleobases 27427-27466 of SEQ ID NO: 10 are targeted by antisense oligonucleotides. In certain embodiments, the antisense oligonucleotides are 15, 16, 17, 18, 19, or 20 nucleobases in length. In certain embodiments, the antisense oligonucleotides are gapmers. In certain embodiments, the gapmers are 5-10-5 MOE gapmers, 4-9-4 MOE gapmers, 4-10-4 MOE gapmers, 4-10-3 MOE gapmers, 3-10-4 MOE gapmers, or 3-10-3 MOE gapmers. In certain embodiments, the gapmers are 5-10-5 MOE and cEt gapmers, 4-9-4 MOE and cEt gapmers, 4-10-4 MOE and cEt gapmers, 4-10-3 MOE and cEt gapmers, 3-10-4 MOE and cEt gapmers, or 3-10-3 MOE and cEt gapmers. In certain embodiments, the nucleosides of the antisense olignonucleotides are linked by phosphorothioate internucleoside linkages.

[0702] In certain embodiments, nucleobases 27427-27466 of SEQ ID NO: 10 are targeted by the following ISIS numbers: 530993, 530994, 530995, 546251, 546252, 546253, 546254, 546255, 546256, 547410, 547411, 547978, 547979, 547980, and 547981.

[0703] In certain embodiments, nucleobases nucleobases 27427-27466 of SEQ ID NO: 10 are targeted by the following SEQ ID NOs: 94, 95, 96, 566, 567, 568, 569, 570, 571, 572, 573, 1597, 1598, 1599, and 1600.

[0704] In certain embodiments, antisense oligonucleotides targeting nucleobases 27427-27466 of SEQ ID NO: 10 achieve at least 30%, at least 31%, at least 32%, at least 33%, at least 34%, at least 35%, at least 36%, at least 37%, at least 38%, at least 39%, at least 40%, at least 41%, at least 42%, at least 43%, at least 44%, at least 45%, at least 46%, at least 47%, at least 48%, at least 49%, at least 50%, at least 51%, at least 52%, at least 53%, at least 54%, at least 55%, at least 56%, at least 57%, at least 58%, at least 59%, at least 60%, at least 61%, at least 62%, at least 63%, at least 64%, at least 65%, at least 66%, at least 67%, at least 68%, at least 69%, at least 70%, at least 71%, at least 72%, at least 73%, at least 74%, at least 75%, at least 76%, at least 77%, at least 78%, at least 79%, at least 80%, at least 81%, at least 82%, at least 83%, at least 84%, at least 85%, at least 86%, at least 87%, at least 88%, at least 89%, at least 90%, at least 91%, at least 92%, at least 93%, at least 94%, at least 95%, at least 96%, at least 97%, at least 98%, or at least 99% reduction of PKK and/or protein levels in vitro and/or in vivo.

### 2. Nucleobases 33183-33242 of SEQ ID NO: 10

[0705] In certain embodiments, antisense oligonucletoides are designed to target nucleobases 33183-33242 of SEQ ID NO: 10 (GENBANK Accession No. NT_016354.19 truncated from nucleobases 111693001 to 111730000). In certain embodiments, nucleobases 33183-33242 of SEQ ID NO: 10 are a hotspot region. In certain embodiments, nucleobases 33183-33242 of SEQ ID NO: 10 are targeted by antisense oligonucleotides. In certain embodiments, the antisense oligonucleotides are 15, 16, 17, 18, 19, or 20 nucleobases in length. In certain embodiments, the antisense oligonucleotides are gapmers. In certain embodiments, the gapmers are 5-10-5 MOE gapmers, 4-9-4 MOE gapmers, 4-10-4 MOE gapmers, 4-10-3 MOE gapmers, 3-10-4 MOE gapmers, or 3-10-3 MOE gapmers. In certain embodiments, the gapmers are 5-10-5 MOE and cEt gapmers, 4-9-4 MOE and cEt gapmers, 4-10-4 MOE and cEt gapmers, 4-10-3 MOE and cEt gapmers, 3-10-4 MOE and cEt gapmers, or 3-10-3 MOE and cEt gapmers. In certain embodiments, the nucleosides of the antisense olignonucleotides are linked by phosphorothioate internucleoside linkages.

[0706] In certain embodiments, nucleobases 33183-33242 of SEQ ID NO: 10 are targeted by the following ISIS numbers: 531052, 531053, 531054, 531055, 531056, 531057, 531158, 546343, 546345, 547480, 547481, 547482, and 547483.

[0707] In certain embodiments, nucleobases nucleobases 33183-33242 of SEQ ID NO: 10 are targeted by the following SEQ ID NOs: 155, 156, 157, 158, 159, 160, 261, 702, 703, 704, 705, 706, and 707.

[0708] In certain embodiments, antisense oligonucleotides targeting nucleobases 33183-33242 of SEQ ID NO: 10 achieve at least 30%, at least 31%, at least 32%, at least 33%, at least 34%, at least 35%, at least 36%, at least 37%, at least 38%, at least 39%, at least 40%, at least 41%, at least 42%, at least 43%, at least 44%, at least 45%, at least 46%, at least 47%, at least 48%, at least 49%, at least 50%, at least 51%, at least 52%, at least 53%, at least 54%, at least 55%, at least 56%, at least 57%, at least 58%, at least 59%, at least 60%, at least 61%, at least 62%, at least 63%, at least 64%, at least 65%, at least 66%, at least 67%, at least 68%, at least 69%, at least 70%, at least 71%, at least 72%, at least 73%, at least 74%, at least 75%, at least 76%, at least 77%, at least 78%, at least 79%, at least 80%, at least 81%, at least 82%, at least 83%, at least 84%, at least 85%, at least 86%, at least 87%, at least 88%, at least 89%, at least 90%, at least 91%, at least 92%, at least 93%, at least 94%, at least 95%, at least 96%, at least 97%, at least 98%, or at least 99% reduction of PKK mRNA and/or protein levels in vitro and/or in vivo.

### 3. Nucleobases 30570-30610 of SEQ ID NO: 10

[0709] In certain embodiments, antisense oligonucletoides are designed to target nucleobases 30570-30610 of SEQ ID NO: 10 (GENBANK Accession No. NT_016354.19 truncated from nucleobases 111693001 to 111730000). In certain embodiments, nucleobases 30570-30610 of SEQ ID NO: 10 are a hotspot region. In certain embodiments, nucleobases 30570-30610 of SEQ ID NO: 10 are targeted by antisense oligonucleotides. In certain embodiments, the antisense oligonucleotides are 15, 16, 17, 18, 19, or 20 nucleobases in length. In certain embodiments, the antisense oligonucleotides are gapmers. In certain embodiments, the gapmers are 5-10-5 MOE gapmers, 4-9-4 MOE gapmers, 4-10-4 MOE gapmers, 4-10-3 MOE gapmers, 3-10-4 MOE gapmers, or 3-10-3 MOE gapmers. In certain embodiments, the gapmers are 5-10-5 MOE and cEt gapmers, 4-9-4 MOE and cEt gapmers, 4-10-4 MOE and cEt gapmers, 4-10-3 MOE and cEt gapmers, 3-10-4 MOE and cEt gapmers, or 3-10-3 MOE and cEt gapmers. In certain embodiments, the nucleosides of the antisense olignonucleotides are linked by phosphorothioate internucleoside linkages.

[0710] In certain embodiments, nucleobases 30570-30610 of SEQ ID NO: 10 are targeted by the following ISIS numbers: 531026, 546309, 546310, 546311, 546313, 547453, 547454, 547455, 547456, 547457, 547458, 548046, 548047, 548048, 548049, and 548050.

[0711] In certain embodiments, nucleobases nucleobases 30570-30610 of SEQ ID NO: 10 are targeted by the following SEQ ID NOs: 129, 652, 653, 654, 655, 656, 657, 658, 659, 660, 661, 1664, 1665, 1666, 1667, and 1668.

[0712] In certain embodiments, antisense oligonucleotides targeting nucleobases 30570-30610 of SEQ ID NO: 10 achieve at least 30%, at least 31%, at least 32%, at least 33%, at least 34%, at least 35%, at least 36%, at least 37%, at least 38%, at least 39%, at least 40%, at least 41%, at least 42%, at least 43%, at least 44%, at least 45%, at least 46%, at least 47%, at least 48%, at least 49%, at least 50%, at least 51%, at least 52%, at least 53%, at least 54%, at least 55%, at least 56%, at least 57%, at least 58%, at least 59%, at least 60%, at least 61%, at least 62%, at least 63%, at least 64%, at least 65%, at least 66%, at least 67%, at least 68%, at least 69%, at least 70%, at least 71%, at least 72%, at least 73%, at least 74%, at least 75%, at least 76%, at least 77%, at least 78%, at least 79%, at least 80%, at least 81%, at least 82%, at least 83%, at least 84%, at least 85%, at least 86%, at least 87%, at least 88%, at least 89%, at least 90%, at least 91%, at least 92%, at least 93%, at least 94%, at least 95%, at least 96%, at least 97%, at least 98%, or at least 99% reduction of PKK mRNA and/or protein levels in vitro and/or in vivo.

### 4. Nucleobases 27427-27520 of SEQ ID NO: 10

[0713] In certain embodiments, antisense oligonucletoides are designed to target nucleobases 27427-27520 of SEQ ID NO: 10 (GENBANK Accession No. NT_016354.19 truncated from nucleobases 111693001 to 111730000). In certain embodiments, nucleobases 27427-27520 of SEQ ID NO: 10 are a hotspot region. In certain embodiments, nucleobases 27427-27520 of SEQ ID NO: 10 are targeted by antisense oligonucleotides. In certain embodiments, the antisense oligonucleotides are 15, 16, 17, 18, 19, or 20 nucleobases in length. In certain embodiments, the antisense oligonucleotides are gapmers. In certain embodiments, the gapmers are 5-10-5 MOE gapmers, 4-9-4 MOE gapmers, 4-10-4 MOE gapmers, 4-10-3 MOE gapmers, 3-10-4 MOE gapmers, or 3-10-3 MOE gapmers. In certain embodiments, the gapmers are 5-10-5 MOE and cEt gapmers, 4-9-4 MOE and cEt gapmers, 4-10-4 MOE and cEt gapmers, 4-10-3 MOE and cEt gapmers, 3-10-4 MOE and cEt gapmers, or 3-10-3 MOE and cEt gapmers. In certain embodiments, the nucleosides of the antisense olignonucleotides are linked by phosphorothioate internucleoside linkages.

[0714] In certain embodiments, nucleobases 27427-27520 of SEQ ID NO: 10 are targeted by the following ISIS numbers: 530993-530999, 546251-546256, 546258-546260, 546263, 546265-546268, 547410-547417, and 547978-547992.

[0715] In certain embodiments, nucleobases nucleobases 27427-27520 of SEQ ID NO: 10 are targeted by the following SEQ ID NOs: 94-100, 566-587, and 1597-1611.

[0716] In certain embodiments, antisense oligonucleotides targeting nucleobases 27427-27520 of SEQ ID NO: 10 achieve at least 30%, at least 31%, at least 32%, at least 33%, at least 34%, at least 35%, at least 36%, at least 37%, at least 38%, at least 39%, at least 40%, at least 41%, at least 42%, at least 43%, at least 44%, at least 45%, at least 46%, at least 47%, at least 48%, at least 49%, at least 50%, at least 51%, at least 52%, at least 53%, at least 54%, at least 55%, at least 56%, at least 57%, at least 58%, at least 59%, at least 60%, at least 61%, at least 62%, at least 63%, at least 64%, at least 65%, at least 66%, at least 67%, at least 68%, at least 69%, at least 70%, at least 71%, at least 72%, at least 73%, at least 74%, at least 75%, at least 76%, at least 77%, at least 78%, at least 79%, at least 80%, at least 81%, at least 82%, at least 83%, at least 84%, at least 85%, at least 86%, at least 87%, at least 88%, at least 89%, at least 90%, at least 91%, at least 92%, at least 93%, at least 94%, at least 95%, at least 96%, at least 97%, at least 98%, or at least 99% reduction of PKK and/or protein levels in vitro and/or in vivo.

### 5. Nucleobases 33085-33247 of SEQ ID NO: 10

[0717] In certain embodiments, antisense oligonucletoides are designed to target nucleobases 33085-33247 of SEQ ID NO: 10 (GENBANK Accession No. NT_016354.19 truncated from nucleobases 111693001 to 111730000). In certain embodiments, nucleobases 33085-33247 of SEQ ID NO: 10 are a hotspot region. In certain embodiments, nucleobases 33085-33247 of SEQ ID NO: 10 are targeted by antisense oligonucleotides. In certain embodiments, the antisense oligonucleotides are 15, 16, 17, 18, 19, or 20 nucleobases in length. In certain embodiments, the antisense oligonucleotides are gapmers. In certain embodiments, the gapmers are 5-10-5 MOE gapmers, 4-9-4 MOE gapmers, 4-10-4 MOE gapmers, 4-10-3 MOE gapmers, 3-10-4 MOE gapmers, or 3-10-3 MOE gapmers. In certain embodiments, the gapmers are 5-10-5 MOE and cEt gapmers, 4-9-4 MOE and cEt gapmers, 4-10-4 MOE and cEt gapmers, 4-10-3 MOE and cEt gapmers, 3-10-4 MOE and cEt gapmers, or 3-10-3 MOE and cEt gapmers. In certain embodiments, the nucleosides of the antisense olignonucleotides are linked by phosphorothioate internucleoside linkages.

[0718] In certain embodiments, nucleobases 33085-33247 of SEQ ID NO: 10 are targeted by the following ISIS numbers: 531041-531158, 546336, 546339, 546340, 546343, 546345, 547474-547483, 547778, 548077-548082, and 548677-548678.

[0719] In certain embodiments, nucleobases nucleobases 33085-33247 of SEQ ID NO: 10 are targeted by the following SEQ ID NOs: 144-160, 261, 693-707, 1256, 1320-1325, 2214, and 2215.

[0720] In certain embodiments, antisense oligonucleotides targeting nucleobases 33085-33247 of SEQ ID NO: 10 achieve at least 30%, at least 31%, at least 32%, at least 33%, at least 34%, at least 35%, at least 36%, at least 37%, at least 38%, at least 39%, at least 40%, at least 41%, at least 42%, at least 43%, at least 44%, at least 45%, at least 46%, at least 47%, at least 48%, at least 49%, at least 50%, at least 51%, at least 52%, at least 53%, at least 54%, at least 55%, at least 56%, at least 57%, at least 58%, at least 59%, at least 60%, at least 61%, at least 62%, at least 63%, at least 64%, at least 65%, at least 66%, at least 67%, at least 68%, at least 69%, at least 70%, at least 71%, at least 72%, at least 73%, at least 74%, at least 75%, at least 76%, at least 77%, at least 78%, at least 79%, at least 80%, at least 81%, at least 82%, at least 83%, at least 84%, at least 85%, at least 86%, at least 87%, at least 88%, at least 89%, at least 90%, at least 91%, at least 92%, at least 93%, at least 94%, at least 95%, at least 96%, at least 97%, at least 98%, or at least 99% reduction of PKK and/or protein levels in vitro and/or in vivo.

### 6. Nucleobases 30475-30639 of SEQ ID NO: 10

[0721] In certain embodiments, antisense oligonucletoides are designed to target nucleobases 30475-30639 of SEQ ID NO: 10 (GENBANK Accession No. NT_016354.19 truncated from nucleobases 111693001 to 111730000). In certain embodiments, nucleobases 30475-30639 of SEQ ID NO: 10 are a hotspot region. In certain embodiments, nucleobases 30475-30639 of SEQ ID NO: 10 are targeted by antisense oligonucleotides. In certain embodiments, the antisense oligonucleotides are 15, 16, 17, 18, 19, or 20 nucleobases in length. In certain embodiments, the antisense oligonucleotides are gapmers. In certain embodiments, the gapmers are 5-10-5 MOE gapmers, 4-9-4 MOE gapmers, 4-10-4 MOE gapmers, 4-10-3 MOE gapmers, 3-10-4 MOE gapmers, or 3-10-3 MOE gapmers. In certain embodiments, the gapmers are 5-10-5 MOE and cEt gapmers, 4-9-4 MOE and cEt gapmers, 4-10-4 MOE and cEt gapmers, 4-10-3 MOE and cEt gapmers, 3-10-4 MOE and cEt gapmers, or 3-10-3 MOE and cEt gapmers. In certain embodiments, the nucleosides of the antisense olignonucleotides are linked by phosphorothioate internucleoside linkages.

[0722] In certain embodiments, nucleobases 30475-30639 of SEQ ID NO: 10 are targeted by the following ISIS numbers: 531021-531029, 531146, 546297, 546299-546304, 546306-546311, 546313, 546316-546319, 547444-547462, 548031, 548032, and 548034-548056.

[0723] In certain embodiments, nucleobases nucleobases 30475-30639 of SEQ ID NO: 10 are targeted by the following SEQ ID NOs: 124-132, 249, 633-669, and 1650-1674.

[0724] In certain embodiments, antisense oligonucleotides targeting nucleobases 30475-30639 of SEQ ID NO: 10 achieve at least 30%, at least 31%, at least 32%, at least 33%, at least 34%, at least 35%, at least 36%, at least 37%, at least 38%, at least 39%, at least 40%, at least 41%, at least 42%, at least 43%, at least 44%, at least 45%, at least 46%, at least 47%, at least 48%, at least 49%, at least 50%, at least 51%, at least 52%, at least 53%, at least 54%, at least 55%, at least 56%, at least 57%, at least 58%, at least 59%, at least 60%, at least 61%, at least 62%, at least 63%, at least 64%, at least 65%, at least 66%, at least 67%, at least 68%, at least 69%, at least 70%, at least 71%, at least 72%, at least 73%, at least 74%, at least 75%, at least 76%, at least 77%, at least 78%, at least 79%, at least 80%, at least 81%, at least 82%, at least 83%, at least 84%, at least 85%, at least 86%, at least 87%, at least 88%, at least 89%, at least 90%, at least 91%, at least 92%, at least 93%, at least 94%, at least 95%, at least 96%, at least 97%, at least 98%, or at least 99% reduction of PKK and/or protein levels in vitro and/or in vivo.

### 7. Nucleobases 27362-27524 of SEQ ID NO: 10

[0725] In certain embodiments, antisense oligonucletoides are designed to target nucleobases 27362-27524 of SEQ ID NO: 10 (GENBANK Accession No. NT_016354.19 truncated from nucleobases 111693001 to 111730000). In certain embodiments, nucleobases 27362-27524 correspond to exon 9 of PKK (GENBANK Accession No. NT_016354.19 truncated from nucleobases 111693001 to 111730000). In certain embodiments, nucleobases 27362-27524 of SEQ ID NO: 10 are a hotspot region. In certain embodiments, nucleobases 27362-27524 of SEQ ID NO: 10 are targeted by antisense oligonucleotides. In certain embodiments, the antisense oligonucleotides are 15, 16, 17, 18, 19, or 20 nucleobases in length. In certain embodiments, the antisense oligonucleotides are gapmers. In certain embodiments, the gapmers are 5-10-5 MOE gapmers, 4-9-4 MOE gapmers, 4-10-4 MOE gapmers, 4-10-3 MOE gapmers, 3-10-4 MOE gapmers, or 3-10-3 MOE gapmers. In certain embodiments, the gapmers are 5-10-5 MOE and cEt gapmers, 4-9-4 MOE and cEt gapmers, 4-10-4 MOE and cEt gapmers, 4-10-3 MOE and cEt gapmers, 3-10-4 MOE and cEt gapmers, or 3-10-3 MOE and cEt gapmers. In certain embodiments, the nucleosides of the antisense olignonucleotides are linked by phosphorothioate internucleoside linkages.

[0726] In certain embodiments, nucleobases 27361-27524 of SEQ ID NO: 10 are targeted by the following ISIS numbers: 530985-530999, 546244, 546247-546256, 546258-546260, 546263, 546265-546268, 547403-547417, 547723, 547968-547970, and 547972-547992.

[0727] In certain embodiments, nucleobases nucleobases 27361-27524 of SEQ ID NO: 10 are targeted by the following SEQ ID NOs: 86-100, 554-587, 1217, and 1588-1611.

[0728] In certain embodiments, antisense oligonucleotides targeting nucleobases 27362-27524 of SEQ ID NO: 10 achieve at least 30%, at least 31%, at least 32%, at least 33%, at least 34%, at least 35%, at least 36%, at least 37%, at least 38%, at least 39%, at least 40%, at least 41%, at least 42%, at least 43%, at least 44%, at least 45%, at least 46%, at least 47%, at least 48%, at least 49%, at least 50%, at least 51%, at least 52%, at least 53%, at least 54%, at least 55%, at least 56%, at least 57%, at least 58%, at least 59%, at least 60%, at least 61%, at least 62%, at least 63%, at least 64%, at least 65%, at least 66%, at least 67%, at least 68%, at least 69%, at least 70%, at least 71%, at least 72%, at least 73%, at least 74%, at least 75%, at least 76%, at least 77%, at least 78%, at least 79%, at least 80%, at least 81%, at least 82%, at least 83%, at least 84%, at least 85%, at least 86%, at least 87%, at least 88%, at least 89%, at least 90%, at least 91%, at least 92%, at least 93%, at least 94%, at least 95%, at least 96%, at least 97%, at least 98%, or at least 99% reduction of PKK and/or protein levels in vitro and/or in vivo.

### 8. Nucleobases 33101-33240 of SEQ ID NO: 10

[0729] In certain embodiments, antisense oligonucletoides are designed to target nucleobases 33101-33240 of SEQ ID NO: 10 (GENBANK Accession No. NT_016354.19 truncated from nucleobases 111693001 to 111730000). In certain embodiments, nucleobases 33101-33240 correspond to exon 14 of PKK (GENBANK Accession No. NT_016354.19 truncated from nucleobases 111693001 to 111730000). In certain embodiments, nucleobases 33101-33240 of SEQ ID NO: 10 are a hotspot region. In certain embodiments, nucleobases 33101-33240 of SEQ ID NO: 10 are targeted by antisense oligonucleotides. In certain embodiments, the antisense oligonucleotides are 15, 16, 17, 18, 19, or 20 nucleobases in length. In certain embodiments, the antisense oligonucleotides are gapmers. In certain embodiments, the gapmers are 5-10-5 MOE gapmers, 4-9-4 MOE gapmers, 4-10-4 MOE gapmers, 4-10-3 MOE gapmers, 3-10-4 MOE gapmers, or 3-10-3 MOE gapmers. In certain embodiments, the gapmers are 5-10-5 MOE and cEt gapmers, 4-9-4 MOE and cEt gapmers, 4-10-4 MOE and cEt gapmers, 4-10-3 MOE and cEt gapmers, 3-10-4 MOE and cEt gapmers, or 3-10-3 MOE and cEt gapmers. In certain embodiments, the nucleosides of the antisense olignonucleotides are linked by phosphorothioate internucleoside linkages.

[0730] In certain embodiments, nucleobases 33101-33240 of SEQ ID NO: 10 are targeted by the following ISIS numbers: 531041-531158, 546336, 546339, 546340, 546343, 546345, 547474-547483, 548077-548082, and 548678-548678.

[0731] In certain embodiments, nucleobases nucleobases 33101-33240 of SEQ ID NO: 10 are targeted by the following SEQ ID NOs: 144-160, 261, 693-707, 1320-1325, and 2215.

[0732] In certain embodiments, antisense oligonucleotides targeting nucleobases 33101-33240 of SEQ ID NO: 10 achieve at least 30%, at least 31%, at least 32%, at least 33%, at least 34%, at least 35%, at least 36%, at least 37%, at least 38%, at least 39%, at least 40%, at least 41%, at least 42%, at least 43%, at least 44%, at least 45%, at least 46%, at least 47%, at least 48%, at least 49%, at least 50%, at least 51%, at least 52%, at least 53%, at least 54%, at least 55%, at least 56%, at least 57%, at least 58%, at least 59%, at least 60%, at least 61%, at least 62%, at least 63%, at least 64%, at least 65%, at least 66%, at least 67%, at least 68%, at least 69%, at least 70%, at least 71%, at least 72%, at least 73%, at least 74%, at least 75%, at least 76%, at least 77%, at least 78%, at least 79%, at least 80%, at least 81%, at least 82%, at least 83%, at least 84%, at least 85%, at least 86%, at least 87%, at least 88%, at least 89%, at least 90%, at least 91%, at least 92%, at least 93%, at least 94%, at least 95%, at least 96%, at least 97%, at least 98%, or at least 99% reduction of PKK and/or protein levels in vitro and/or in vivo.

### 9. Nucleobases 30463-30638 of SEQ ID NO: 10

[0733] In certain embodiments, antisense oligonucletoides are designed to target nucleobases 30463-30638 of SEQ ID NO: 10 (GENBANK Accession No. NT_016354.19 truncated from nucleobases 111693001 to 111730000). In certain embodiments, nucleobases 30463-30638 correspond to exon 12 of PKK (GENBANK Accession No. NT_016354.19 truncated from nucleobases 111693001 to 111730000). In certain embodiments, nucleobases 30463-30638 of SEQ ID NO: 10 are a hotspot region. In certain embodiments, nucleobases 30463-30638 of SEQ ID NO: 10 are targeted by antisense oligonucleotides. In certain embodiments, the antisense oligonucleotides are 15, 16, 17, 18, 19, or 20 nucleobases in length. In certain embodiments, the antisense oligonucleotides are gapmers. In certain embodiments, the gapmers are 5-10-5 MOE gapmers, 4-9-4 MOE gapmers, 4-10-4 MOE gapmers, 4-10-3 MOE gapmers, 3-10-4 MOE gapmers, or 3-10-3 MOE gapmers. In certain embodiments, the gapmers are 5-10-5 MOE and cEt gapmers, 4-9-4 MOE and cEt gapmers, 4-10-4 MOE and cEt gapmers, 4-10-3 MOE and cEt gapmers, 3-10-4 MOE and cEt gapmers, or 3-10-3 MOE and cEt gapmers. In certain embodiments, the nucleosides of the antisense olignonucleotides are linked by phosphorothioate internucleoside linkages.

[0734] In certain embodiments, nucleobases 30463-30638 of SEQ ID NO: 10 are targeted by the following ISIS numbers: 531021-531029, 531146, 546297, 546299-546304, 546306-546311, 546313, 546316-546319, 547444-547462, 548031, 548032, and 548034-548056.

[0735] In certain embodiments, nucleobases nucleobases 30463-30638 of SEQ ID NO: 10 are targeted by the following SEQ ID NOs: 124-132, 249, 633-669, and 1650-1674.

[0736] In certain embodiments, antisense oligonucleotides targeting nucleobases 30463-30638 of SEQ ID NO: 10 achieve at least 30%, at least 31%, at least 32%, at least 33%, at least 34%, at least 35%, at least 36%, at least 37%, at least 38%, at least 39%, at least 40%, at least 41%, at least 42%, at least 43%, at least 44%, at least 45%, at least 46%, at least 47%, at least 48%, at least 49%, at least 50%, at least 51%, at least 52%, at least 53%, at least 54%, at least 55%, at least 56%, at least 57%, at least 58%, at least 59%, at least 60%, at least 61%, at least 62%, at least 63%, at least 64%, at least 65%, at least 66%, at least 67%, at least 68%, at least 69%, at least 70%, at least 71%, at least 72%, at least 73%, at least 74%, at least 75%, at least 76%, at least 77%, at least 78%, at least 79%, at least 80%, at least 81%, at least 82%, at least 83%, at least 84%, at least 85%, at least 86%, at least 87%, at least 88%, at least 89%, at least 90%, at least 91%, at least 92%, at least 93%, at least 94%, at least 95%, at least 96%, at least 97%, at least 98%, or at least 99% reduction of PKK and/or protein levels in vitro and/or in vivo.

### EXAMPLES

### Non-Limiting Disclosure and Incorporation by Reference

[0737] While certain compounds, compositions and methods described herein have been described with specificity in accordance with certain embodiments, the following examples serve only to illustrate the compounds described herein and are not intended to limit the same. Each of the references recited in the present application is incorporated herein by reference in its entirety. The following examples illustrate certain embodiments of the present disclosure and are not limiting. Moreover, where specific embodiments are provided, the inventors have contemplated generic application of those specific embodiments. For example, disclosure of an oligonucleotide having a particular motif provides reasonable support for additional oligonucleotides having the same or similar motif And, for example, where a particular high-affinity modification appears at a particular position, other high-affinity modifications at the same position are considered suitable, unless otherwise indicated.

### Example 1: General Method for the Preparation of Phosphoramidites, Compounds 1, 1a and 2

[chemical structure]

[0738] Bx is a heterocyclic base;

[0739] Compounds 1, 1a and 2 were prepared as per the procedures well known in the art as described in the specification herein (see Seth et al., Bioorg. Med. Chem., 2011, 21(4), 1122-1125, J. Org. Chem., 2010, 75(5), 1569-1581, Nucleic Acids Symposium Series, 2008, 52(1), 553-554); and also see published PCT International Applications (WO 2011/115818, WO 2010/077578, WO2010/036698, WO2009/143369, WO 2009/006478, and WO 2007/090071), and U.S. Pat. No. 7,569,686).

### Example 2: Preparation of Compound 7

[chemical structure]

[0740] Compounds 3 (2-acetamido-1,3,4,6-tetra-O-acetyl-2-deoxy-β-Dgalactopyranose or galactosamine pentaacetate) is commercially available. Compound 5 was prepared according to published procedures (Weber et al., J. Med. Chem., 1991, 34, 2692).

### Example 3: Preparation of Compound 11

[chemical structure]

[0741] Compounds 8 and 9 are commercially available.

### Example 4: Preparation of Compound 18

[chemical structure]

[chemical structure]

[0742] Compound 11 was prepared as per the procedures illustrated in Example 3. Compound 14 is commercially available. Compound 17 was prepared using similar procedures reported by Rensen et al., J. Med. Chem., 2004, 47, 5798-5808.

### Example 5: Preparation of Compound 23

[chemical structure]

[0743] Compounds 19 and 21 are commercially available.

### Example 6: Preparation of Compound 24

[chemical structure]

[0744] Compounds 18 and 23 were prepared as per the procedures illustrated in Examples 4 and 5.

### Example 7: Preparation of Compound 25

[chemical structure]

[0745] Compound 24 was prepared as per the procedures illustrated in Example 6.

### Example 8: Preparation of Compound 26

[chemical structure]

[0746] Compound 24 is prepared as per the procedures illustrated in Example 6.

### Example 9: General Preparation of Conjugated ASOs Comprising GalNAc₃-1 at the 3′ Terminus, Compound 29

[chemical structure]

[0747] Wherein the protected GalNAc₃-1 has the structure:

[chemical structure]

[0748] The GalNAc₃ cluster portion of the conjugate group GalNAc₃-1 (GalNAc₃-1ₐ) can be combined with any cleavable moiety to provide a variety of conjugate groups. Wherein GalNAc₃-1ₐ has the formula:

[chemical structure]

[0749] The solid support bound protected GalNAc₃-1, Compound 25, was prepared as per the procedures illustrated in Example 7. Oligomeric Compound 29 comprising GalNAc₃-1 at the 3′ terminus was prepared using standard procedures in automated DNA/RNA synthesis (see Dupouy et al., Angew. Chem. Int. Ed., 2006, 45, 3623-3627). Phosphoramidite building blocks, Compounds 1 and 1a were prepared as per the procedures illustrated in Example 1. The phosphoramidites illustrated are meant to be representative and not intended to be limiting as other phosphoramidite building blocks can be used to prepare oligomeric compounds having a predetermined sequence and composition. The order and quantity of phosphoramidites added to the solid support can be adjusted to prepare gapped oligomeric compounds as described herein. Such gapped oligomeric compounds can have predetermined composition and base sequence as dictated by any given target.

### Example 10: General Preparation Conjugated ASOs Comprising GalNAc₃-1 at the 5′ Terminus, Compound 34

[chemical structure]

[chemical structure]

[0750] The Unylinker™ 30 is commercially available. Oligomeric Compound 34 comprising a GalNAc₃-1 cluster at the 5′ terminus is prepared using standard procedures in automated DNA/RNA synthesis (see Dupouy et al., Angew. Chem. Int. Ed., 2006, 45, 3623-3627). Phosphoramidite building blocks, Compounds 1 and 1a were prepared as per the procedures illustrated in Example 1. The phosphoramidites illustrated are meant to be representative and not intended to be limiting as other phosphoramidite building blocks can be used to prepare an oligomeric compound having a predetermined sequence and composition. The order and quantity of phosphoramidites added to the solid support can be adjusted to prepare gapped oligomeric compounds as described herein. Such gapped oligomeric compounds can have predetermined composition and base sequence as dictated by any given target.

### Example 11: Preparation of Compound 39

[chemical structure]

[chemical structure]

[0751] Compounds 4, 13 and 23 were prepared as per the procedures illustrated in Examples 2, 4, and 5. Compound 35 is prepared using similar procedures published in Rouchaud et al., Eur. J. Org. Chem., 2011, 12, 2346-2353.

### Example 12: Preparation of Compound 40

[chemical structure]

[0752] Compound 38 is prepared as per the procedures illustrated in Example 11.

### Example 13: Preparation of Compound 44

[chemical structure]

[chemical structure]

[0753] Compounds 23 and 36 are prepared as per the procedures illustrated in Examples 5 and 11. Compound 41 is prepared using similar procedures published in WO 2009082607.

### Example 14: Preparation of Compound 45

[chemical structure]

[0754] Compound 43 is prepared as per the procedures illustrated in Example 13.

### Example 15: Preparation of Compound 47

[chemical structure]

[0755] Compound 46 is commercially available.

### Example 16: Preparation of Compound 53

[chemical structure]

[chemical structure]

[0756] Compounds 48 and 49 are commercially available. Compounds 17 and 47 are prepared as per the procedures illustrated in Examples 4 and 15.

### Example 17: Preparation of Compound 54

[chemical structure]

[0757] Compound 53 is prepared as per the procedures illustrated in Example 16.

### Example 18: Preparation of Compound 55

[chemical structure]

[0758] Compound 53 is prepared as per the procedures illustrated in Example 16.

### Example 19: General Method for the Preparation of Conjugated ASOs Comprising GalNAc₃-1 at the 3′ Position Via Solid Phase Techniques (Preparation of ISIS 647535, 647536 and 651900)

[0759] Unless otherwise stated, all reagents and solutions used for the synthesis of oligomeric compounds are purchased from commercial sources. Standard phosphoramidite building blocks and solid support are used for incorporation nucleoside residues which include for example T, A, G, and mC residues. A 0.1 M solution of phosphoramidite in anhydrous acetonitrile was used for β-D-2′-deoxyribonucleoside and 2′-MOE.

[0760] The ASO syntheses were performed on ABI 394 synthesizer (1-2 μmol scale) or on GE Healthcare Bioscience AKTA oligopilot synthesizer (40-200 μmol scale) by the phosphoramidite coupling method on an GalNAc₃-1 loaded VIMAD solid support (110 μmol/g, Guzaev et al., 2003) packed in the column. For the coupling step, the phosphoramidites were delivered 4 fold excess over the loading on the solid support and phosphoramidite condensation was carried out for 10 min. All other steps followed standard protocols supplied by the manufacturer. A solution of 6% dichloroacetic acid in toluene was used for removing dimethoxytrityl (DMT) group from 5′-hydroxyl group of the nucleotide. 4,5-Dicyanoimidazole (0.7 M) in anhydrous CH₃CN was used as activator during coupling step. Phosphorothioate linkages were introduced by sulfurization with 0.1 M solution of xanthane hydride in 1:1 pyridine/CH₃CN for a contact time of 3 minutes. A solution of 20% tert-butylhydroperoxide in CH₃CN containing 6% water was used as an oxidizing agent to provide phosphodiester internucleoside linkages with a contact time of 12 minutes.

[0761] After the desired sequence was assembled, the cyanoethyl phosphate protecting groups were deprotected using a 1:1 (v/v) mixture of triethylamine and acetonitrile with a contact time of 45 minutes. The solid-support bound ASOs were suspended in aqueous ammonia (28-30 wt %) and heated at 55° C. for 6 h.

[0762] The unbound ASOs were then filtered and the ammonia was boiled off. The residue was purified by high pressure liquid chromatography on a strong anion exchange column (GE Healthcare Bioscience, Source 30Q, 30 μm, 2.54×8 cm, λ=100 mM ammonium acetate in 30% aqueous CH₃CN, B=1.5 M NaBr in A, 0-40% of B in 60 min, flow 14 mL min-1, λ=260 nm). The residue was desalted by HPLC on a reverse phase column to yield the desired ASOs in an isolated yield of 15-30% based on the initial loading on the solid support. The ASOs were characterized by ion-pair-HPLC coupled MS analysis with Agilent 1100 MSD system.

[0763] Antisense oligonucleotides not comprising a conjugate were synthesized using standard oligonucleotide synthesis procedures well known in the art.

[0764] Using these methods, three separate antisense compounds targeting ApoC III were prepared. As summarized in Table 17, below, each of the three antisense compounds targeting ApoC III had the same nucleobase sequence; ISIS 304801 is a 5-10-5 MOE gapmer having all phosphorothioate linkages; ISIS 647535 is the same as ISIS 304801, except that it had a GalNAc₃-1 conjugated at its 3′ end; and ISIS 647536 is the same as ISIS 647535 except that certain internucleoside linkages of that compound are phosphodiester linkages. As further summarized in Table 17, two separate antisense compounds targeting SRB-1 were synthesized. ISIS 440762 was a 2-10-2 cEt gapmer with all phosphorothioate internucleoside linkages; ISIS 651900 is the same as ISIS 440762, except that it included a GalNAc₃-1 at its 3′-end.

TABLE 17
Modified ASO targeting ApoC III and SRB-1

| | | | | Ob- | SEQ |
|---|---|---|---|---|---|
| | Sequence | | CalCd | served | ID |
| ASO | (5′ to 3′) | Target | Mass | Mass | No. |
| ISIS | AₑₛGₑₛ^{m}CₑₛTₑₛTₑₛ^{m}C_{ds} | ApoC | 7165.4 | 7164.4 | 2248 |
| 304801 | T_{ds}T_{ds}G_{ds}T_{ds}^{m}C_{ds}^{m}C_{ds} | III | | | |
| | A_{ds}G_{ds}^{m}C_{ds}TₑₛTₑₛTₑₛ | | | | |
| | AₑₛTₑ | | | | |
| ISIS | AₑₛGₑₛ^{m}CₑₛTₑₛTₑₛ^{m}C_{ds} | ApoC | 9239.5 | 9237.8 | 2249 |
| 647535 | T_{ds}T_{ds}G_{ds}T_{ds}^{m}C_{ds}^{m}C_{ds} | III | | | |
| | A_{ds}G_{ds}^{m}C_{ds}TₑₛTₑₛTₑₛ | | | | |
| | AₑₛTₑₒA_{do'}- | | | | |
| | GalNAc₃-1ₐ | | | | |
| ISIS | AₑₛGₑₒ^{m}CₑₒTₑₒTₑₒ^{m}C_{ds} | ApoC | 9142.9 | 9140.8 | 2249 |
| 647536 | T_{ds}T_{ds}G_{ds}T_{ds}^{m}C_{ds}^{m}C_{ds} | III | | | |
| | A_{ds}G_{ds}^{m}C_{ds}TₑₒTₑₒTₑₛ | | | | |
| | AₑₛTₑₒA_{do'}- | | | | |
| | GalNAc₃-1ₐ | | | | |
| ISIS | Tₖₛ^{m}CₖₛA_{ds}G_{ds}T_{ds}^{m}C_{ds} | SRB- | 4647.0 | 4646.4 | 2250 |
| 440762 | A_{ds}T_{ds}G_{ds}A_{ds}^{m}C_{ds}T_{ds} | 1 | | | |
| | Tₖₛ^{m}Cₖ | | | | |
| ISIS | Tₖₛ^{m}CₖₛA_{ds}G_{ds}T_{ds}^{m}C_{ds} | SRB- | 6721.1 | 6719.4 | 2251 |
| 651900 | A_{ds}T_{ds}G_{ds}A_{ds}^{m}C_{ds}T_{ds} | 1 | | | |
| | Tₖₛ^{m}CₖₒA_{do'}- | | | | |
| | GalNAC₃-1ₐ | | | | |

Subscripts: “e” indicates 2′-MOE modified nucleoside; “d” indicates β-D-2′-deoxyribonucleoside; “k” indicates 6′-(S)—CH₃ bicyclic nucleoside (e.g. cEt); “s” indicates phosphorothioate internucleoside linkages (PS); “o” indicates phosphodiester internucleoside linkages (PO); and “o′” indicates —O—P(═O)(OH)—. Superscript “m” indicates 5-methylcytosines. “GalNAc₃-1” indicates a conjugate group having the structure shown previously in Example 9. Note that GalNAc₃-1 comprises a cleavable adenosine which links the ASO to remainder of the conjugate, which is designated “GalNAc₃-1ₐ.” This nomenclature is used in the above table to show the full nucleobase sequence, including the adenosine, which is part of the conjugate. Thus, in the above table, the sequences could also be listed as ending with “GalNAc₃-1” with the “A_{d}.” omitted. This convention of using the subscript “a” to indicate the portion of a conjugate group lacking a cleavable nucleoside or cleavable moiety is used throughout these Examples. This portion of a conjugate group lacking the cleavable moiety is referred to herein as a “cluster” or “conjugate cluster” or “GalNAc₃ cluster.” In certain instances it is convenient to describe a conjugate group by separately providing its cluster and its cleavable moiety.

### Example 20: Dose-Dependent Antisense Inhibition of Human ApoC III in huApoC III Transgenic Mice

[0765] ISIS 304801 and ISIS 647535, each targeting human ApoC III and described above, were separately tested and evaluated in a dose-dependent study for their ability to inhibit human ApoC III in human ApoC III transgenic mice.

### Treatment

[0766] Human ApoCIII transgenic mice were maintained on a 12-hour light/dark cycle and fed ad libitum Teklad lab chow. Animals were acclimated for at least 7 days in the research facility before initiation of the experiment. ASOs were prepared in PBS and sterilized by filtering through a 0.2 micron filter. ASOs were dissolved in 0.9% PBS for injection.

[0767] Human ApoC III transgenic mice were injected intraperitoneally once a week for two weeks with ISIS 304801 or 647535 at 0.08, 0.25, 0.75, 2.25 or 6.75 μmol/kg or with PBS as a control. Each treatment group consisted of 4 animals. Forty-eight hours after the administration of the last dose, blood was drawn from each mouse and the mice were sacrificed and tissues were collected.

ApoC III mRNA Analysis

[0768] ApoC III mRNA levels in the mice's livers were determined using real-time PCR and RIBOGREEN® RNA quantification reagent (Molecular Probes, Inc. Eugene, OR) according to standard protocols. ApoC III mRNA levels were determined relative to total RNA (using Ribogreen), prior to normalization to PBS-treated control. The results below are presented as the average percent of ApoC III mRNA levels for each treatment group, normalized to PBS-treated control and are denoted as “% PBS”. The half maximal effective dosage (ED₅₀) of each ASO is also presented in Table 18, below.

[0769] As illustrated, both antisense compounds reduced ApoC III RNA relative to the PBS control. Further, the antisense compound conjugated to GalNAc₃-1 (ISIS 647535) was substantially more potent than the antisense compound lacking the GalNAc₃-1 conjugate (ISIS 304801).

TABLE 18
Effect of ASO treatment on ApoC III mRNA levels in
human ApoC III transgenic mice

| | Dose | | ED₅₀ | | | SEQ |
|---|---|---|---|---|---|---|
| | (μmol/ | % | (μmol/ | | Internucleoside | ID |
| ASO | kg) | PBS | kg) | 3′ Conjugate | linkage/Length | No. |
| PBS | 0 | 100 | — | — | — | |
| ISIS | 0.08 | 95 | 0.77 | None | PS/20 | 2248 |
| 304801 | 0.75 | 42 | | | | |
| | 2.25 | 32 | | | | |
| | 6.75 | 19 | | | | |
| ISIS | 0.08 | 50 | 0.074 | GalNAc₃-1 | PS/20 | 2249 |
| 647535 | 0.75 | 15 | | | | |
| | 2.25 | 17 | | | | |
| | 6.75 | 8 | | | | |

### ApoC III Protein Analysis (Turbidometric Assay)

[0770] Plasma ApoC III protein analysis was determined using procedures reported by Graham et al, Circulation Research, published online before print Mar. 29, 2013. Approximately 100 μl of plasma isolated from mice was analyzed without dilution using an Olympus Clinical Analyzer and a commercially available turbidometric ApoC III assay (Kamiya, Cat#KAI-006, Kamiya Biomedical, Seattle, WA). The assay protocol was performed as described by the vendor. As shown in the Table 19 below, both antisense compounds reduced ApoC III protein relative to the PBS control. Further, the antisense compound conjugated to GalNAc₃-1 (ISIS 647535) was substantially more potent than the antisense compound lacking the GaNNACA conjugate (ISIS 304801).

TABLE 19
Effect of ASO treatment on ApoC III plasma protein levels
in human ApoC III transgenic mice

| | Dose | | ED₅₀ | | | SEQ |
|---|---|---|---|---|---|---|
| | (μmol/ | % | (μmol/ | | Internucleoside | ID |
| ASO | kg) | PBS | kg) | 3′ Conjugate | Linkage/Length | No. |
| PBS | 0 | 100 | — | — | — | |
| ISIS | 0.08 | 86 | 0.73 | None | PS/20 | 2248 |
| 304801 | 0.75 | 51 | | | | |
| | 2.25 | 23 | | | | |
| | 6.75 | 13 | | | | |
| ISIS | 0.08 | 72 | 0.19 | GalNAc₃-1 | PS/20 | 2249 |
| 647535 | 0.75 | 14 | | | | |
| | 2.25 | 12 | | | | |
| | 6.75 | 11 | | | | |

[0771] Plasma triglycerides and cholesterol were extracted by the method of Bligh and Dyer (Bligh, E. G. and Dyer, W. J. Can. J. Biochem. Physiol. 37: 911-917, 1959)(Bligh, E and Dyer, W, Can J Biochem Physiol, 37, 911-917, 1959)(Bligh, E and Dyer, W, Can J Biochem Physiol, 37, 911-917, 1959) and measured by using a Beckmann Coulter clinical analyzer and commercially available reagents.

[0772] The triglyceride levels were measured relative to PBS injected mice and are denoted as “% PBS”. Results are presented in Table 20. As illustrated, both antisense compounds lowered triglyceride levels. Further, the antisense compound conjugated to GalNAc₃-1 (ISIS 647535) was substantially more potent than the antisense compound lacking the GalNAc₃-1 conjugate (ISIS 304801).

TABLE 20
Effect of ASO treatment on triglyceride levels in transgenic mice

| | Dose | | ED₅₀ | | | SEQ |
|---|---|---|---|---|---|---|
| | (μmol/ | % | (μmol/ | 3′ | Internucleoside | ID |
| ASO | kg) | PBS | kg) | Conjugate | Linkage/Length | No. |
| PBS | 0 | 100 | — | — | — | |
| ISIS | 0.08 | 87 | 0.63 | None | PS/20 | 2248 |
| 304801 | 0.75 | 46 | | | | |
| | 2.25 | 21 | | | | |
| | 6.75 | 12 | | | | |
| ISIS | 0.08 | 65 | 0.13 | GalNAc₃-1 | PS/20 | 2249 |
| 647535 | 0.75 | 9 | | | | |
| | 2.25 | 8 | | | | |
| | 6.75 | 9 | | | | |

[0773] Plasma samples were analyzed by HPLC to determine the amount of total cholesterol and of different fractions of cholesterol (HDL and LDL). Results are presented in Tables 21 and 22. As illustrated, both antisense compounds lowered total cholesterol levels; both lowered LDL; and both raised HDL. Further, the antisense compound conjugated to GalNAc₃-1 (ISIS 647535) was substantially more potent than the antisense compound lacking the GalNAc₃-1 conjugate (ISIS 304801). An increase in HDL and a decrease in LDL levels is a cardiovascular beneficial effect of antisense inhibition of ApoC III.

TABLE 21
Effect of ASO treatment on total cholesterol levels in transgenic mice

| | | Total | | | |
|---|---|---|---|---|---|
| | Dose | Cholesterol | 3′ | Internucleoside | SEQ |
| ASO | (μmol/kg) | (mg/dL) | Conjugate | Linkage/Length | ID No. |
| PBS | 0 | 257 | — | — | |
| ISIS | 0.08 | 226 | None | PS/20 | 2248 |
| 304801 | 0.75 | 164 | | | |
| | 2.25 | 110 | | | |
| | 6.75 | 82 | | | |
| ISIS | 0.08 | 230 | GalNAc₃-1 | PS/20 | 2249 |
| 647535 | 0.75 | 82 | | | |
| | 2.25 | 86 | | | |
| | 6.75 | 99 | | | |

TABLE 22
Effect of ASO treatment on HDL and LDL cholesterol
levels in transgenic mice

| | Dose | HDL | | | | SEQ |
|---|---|---|---|---|---|---|
| | (μmol/ | (mg/ | LDL | 3′ | Internucleoside | ID |
| ASO | kg) | dL) | (mg/dL) | Conjugate | Linkage/Length | No. |
| PBS | 0 | 17 | 28 | — | — | |
| ISIS | 0.08 | 17 | 23 | None | PS/20 | 2248 |
| 304801 | 0.75 | 27 | 12 | | | |
| | 2.25 | 50 | 4 | | | |
| | 6.75 | 45 | 2 | | | |
| ISIS | 0.08 | 21 | 21 | GalNAc₃-1 | PS/20 | 2249 |
| 647535 | 0.75 | 44 | 2 | | | |
| | 2.25 | 50 | 2 | | | |
| | 6.75 | 58 | 2 | | | |

### Pharmacokine Tics Analysis (PK)

[0774] The PK of the ASOs was also evaluated. Liver and kidney samples were minced and extracted using standard protocols. Samples were analyzed on MSD1 utilizing IP-HPLC-MS. The tissue level (μg/g) of full-length ISIS 304801 and 647535 was measured and the results are provided in Table 23. As illustrated, liver concentrations of total full-length antisense compounds were similar for the two antisense compounds. Thus, even though the GalNAc₃-1-conjugated antisense compound is more active in the liver (as demonstrated by the RNA and protein data above), it is not present at substantially higher concentration in the liver. Indeed, the calculated EC₅₀ (provided in Table 23) confirms that the observed increase in potency of the conjugated compound cannot be entirely attributed to increased accumulation. This result suggests that the conjugate improved potency by a mechanism other than liver accumulation alone, possibly by improving the productive uptake of the antisense compound into cells.

[0775] The results also show that the concentration of GalNAc₃-1 conjugated antisense compound in the kidney is lower than that of antisense compound lacking the GalNAc conjugate. This has several beneficial therapeutic implications. For therapeutic indications where activity in the kidney is not sought, exposure to kidney risks kidney toxicity without corresponding benefit. Moreover, high concentration in kidney typically results in loss of compound to the urine resulting in faster clearance. Accordingly, for non-kidney targets, kidney accumulation is undesired. These data suggest that GalNAc₃-1 conjugation reduces kidney accumulation.

TABLE 23
PK analysis of ASO treatment in transgenic mice

| | Dose | Liver | Kidney | Liver EC₅₀ | 3′ | Internucleoside | SEQ |
|---|---|---|---|---|---|---|---|
| ASO | (μmol/kg) | (μg/g) | (μg/g) | (μg/g) | Conjugate | Linkage/Length | ID No. |
| ISIS | 0.1 | 5.2 | 2.1 | 53 | None | PS/20 | 2248 |
| 304801 | 0.8 | 62.8 | 119.6 | | | | |
| | 2.3 | 142.3 | 191.5 | | | | |
| | 6.8 | 202.3 | 337.7 | | | | |
| ISIS | 0.1 | 3.8 | 0.7 | 3.8 | GalNAc₃-1 | PS/20 | 2249 |
| 647535 | 0.8 | 72.7 | 34.3 | | | | |
| | 2.3 | 106.8 | 111.4 | | | | |
| | 6.8 | 237.2 | 179.3 | | | | |

[0776] Metabolites of ISIS 647535 were also identified and their masses were confirmed by high resolution mass spectrometry analysis. The cleavage sites and structures of the observed metabolites are shown below. The relative % of full length ASO was calculated using standard procedures and the results are presented in Table 23a. The major metabolite of ISIS 647535 was full-length ASO lacking the entire conjugate (i.e. ISIS 304801), which results from cleavage at cleavage site A, shown below. Further, additional metabolites resulting from other cleavage sites were also observed. These results suggest that introducing other cleabable bonds such as esters, peptides, disulfides, phosphoramidates or acyl-hydrazones between the GalNAc₃-1 sugar and the ASO, which can be cleaved by enzymes inside the cell, or which may cleave in the reductive environment of the cytosol, or which are labile to the acidic pH inside endosomes and lyzosomes, can also be useful.

TABLE 23a
Observed full length metabolites of ISIS 647535

| | | Cleavage | Relative |
|---|---|---|---|
| Metabolite | ASO | site | % |
| 1 | ISIS 304801 | A | 36.1 |
| 2 | ISIS 304801 + dA | B | 10.5 |
| 3 | ISIS 647535 minus [3 GalNAc] | C | 16.1 |
| 4 | ISIS 647535 minus | D | 17.6 |
| | [3 GalNAc + 1 5-hydroxy-pentanoic | | |
| | acid tether] | | |
| 5 | ISIS 647535 minus | D | 9.9 |
| | [2 GalNAc + 2 5-hydroxy-pentanoic | | |
| | acid tether] | | |
| 6 | ISIS 647535 minus | D | 9.8 |
| | [3 GalNAc + 3 5-hydroxy-pentanoic | | |
| | acid tether] | | |

[chemical structure]

[chemical structure]

### Example 21: Antisense Inhibition of Human ApoC III in Human ApoC III Transgenic Mice in Single Administration Study

[0777] ISIS 304801, 647535 and 647536 each targeting human ApoC III and described in Table 17, were further evaluated in a single administration study for their ability to inhibit human ApoC III in human ApoC III transgenic mice.

### Treatment

[0778] Human ApoCIII transgenic mice were maintained on a 12-hour light/dark cycle and fed ad libitum Teklad lab chow. Animals were acclimated for at least 7 days in the research facility before initiation of the experiment. ASOs were prepared in PBS and sterilized by filtering through a 0.2 micron filter. ASOs were dissolved in 0.9% PBS for injection.

[0779] Human ApoC III transgenic mice were injected intraperitoneally once at the dosage shown below with ISIS 304801, 647535 or 647536 (described above) or with PBS treated control. The treatment group consisted of 3 animals and the control group consisted of 4 animals. Prior to the treatment as well as after the last dose, blood was drawn from each mouse and plasma samples were analyzed. The mice were sacrificed 72 hours following the last administration.

[0780] Samples were collected and analyzed to determine the ApoC III mRNA and protein levels in the liver; plasmatriglycerides; and cholesterol, including HDL and LDL fractions were assessed as described above (Example 20). Data from those analyses are presented in Tables 24-28, below. Liver transaminase levels, alanine aminotransferase (ALT) and aspartate aminotransferase (AST), in serum were measured relative to saline injected mice using standard protocols. The ALT and AST levels showed that the antisense compounds were well tolerated at all administered doses.

[0781] These results show improvement in potency for antisense compounds comprising a GalNAc₃-1 conjugate at the 3′ terminus (ISIS 647535 and 647536) compared to the antisense compound lacking a GalNAc₃-1 conjugate (ISIS 304801). Further, ISIS 647536, which comprises a GalNAc₃-1 conjugate and some phosphodiester linkages was as potent as ISIS 647535, which comprises the same conjugate and all internucleoside linkages within the ASO are phosphorothioate.

TABLE 24
Effect of ASO treatment on ApoC III mRNA levels in human
ApoC III transgenic mice

| | | | | | | SEQ |
|---|---|---|---|---|---|---|
| | Dose | % | ED₅₀ | 3′ | Internucleoside | ID |
| ASO | (mg/kg) | PBS | (mg/kg) | Conjugate | linkage/Length | No. |
| PBS | 0 | 99 | — | — | — | |
| ISIS | 1 | 104 | 13.2 | None | PS/20 | 2248 |
| 304801 | 3 | 92 | | | | |
| | 10 | 71 | | | | |
| | 30 | 40 | | | | |
| ISIS | 0.3 | 98 | 1.9 | GalNAc₃-1 | PS/20 | 2249 |
| 647535 | 1 | 70 | | | | |
| | 3 | 33 | | | | |
| | 10 | 20 | | | | |
| ISIS | 0.3 | 103 | 1.7 | GalNAc₃-1 | PS/PO/20 | 2249 |
| 647536 | 1 | 60 | | | | |
| | 3 | 31 | | | | |
| | 10 | 21 | | | | |

TABLE 25
Effect of ASO treatment on ApoC III plasma protein
levels in human ApoC III transgenic mice

| | | | | | Internu- | |
|---|---|---|---|---|---|---|
| | | | | | cleoside | |
| | Dose | % | ED₅₀ | 3′ | Linkage/ | SEQ ID |
| ASO | (mg/kg) | PBS | (mg/kg) | Conjugate | Length | No. |
| PBS | 0 | 99 | — | — | — | |
| ISIS | 1 | 104 | 23.2 | None | PS/20 | 2248 |
| 304801 | 3 | 92 | | | | |
| | 10 | 71 | | | | |
| | 30 | 40 | | | | |
| ISIS | 0.3 | 98 | 2.1 | GalNAc₃-1 | PS/20 | 2249 |
| 647535 | 1 | 70 | | | | |
| | 3 | 33 | | | | |
| | 10 | 20 | | | | |
| ISIS | 0.3 | 103 | 1.8 | GalNAc₃-1 | PS/PO/20 | 2249 |
| 647536 | 1 | 60 | | | | |
| | 3 | 31 | | | | |
| | 10 | 21 | | | | |

TABLE 26
Effect of ASO treatment on triglyceride levels in transgenic mice

| | | | | | Internu- | |
|---|---|---|---|---|---|---|
| | | | | | cleoside | |
| | Dose | % | ED₅₀ | 3′ | Linkage/ | SEQ ID |
| ASO | (mg/kg) | PBS | (mg/kg) | Conjugate | Length | No. |
| PBS | 0 | 98 | — | — | — | |
| ISIS | 1 | 80 | 29.1 | None | PS/20 | 2248 |
| 304801 | 3 | 92 | | | | |
| | 10 | 70 | | | | |
| | 30 | 47 | | | | |
| ISIS | 0.3 | 100 | 2.2 | GalNAc₃-1 | PS/20 | 2249 |
| 647535 | 1 | 70 | | | | |
| | 3 | 34 | | | | |
| | 10 | 23 | | | | |
| ISIS | 0.3 | 95 | 1.9 | GalNAc₃-1 | PS/PO/20 | 2249 |
| 647536 | 1 | 66 | | | | |
| | 3 | 31 | | | | |
| | 10 | 23 | | | | |

TABLE 27
Effect of ASO treatment on total cholesterol levels in transgenic mice

| | Dose | | 3′ | Internucleoside | SEQ |
|---|---|---|---|---|---|
| ASO | (mg/kg) | % PBS | Conjugate | Linkage/Length | ID No. |
| PBS | 0 | 96 | — | — | |
| ISIS | 1 | 104 | None | PS/20 | 2248 |
| 304801 | 3 | 96 | | | |
| | 10 | 86 | | | |
| | 30 | 72 | | | |
| ISIS | 0.3 | 93 | GalNAc₃-1 | PS/20 | 2249 |
| 647535 | 1 | 85 | | | |
| | 3 | 61 | | | |
| | 10 | 53 | | | |
| ISIS | 0.3 | 115 | GalNAc₃-1 | PS/PO/20 | 2249 |
| 647536 | 1 | 79 | | | |
| | 3 | 51 | | | |
| | 10 | 54 | | | |

TABLE 28
Effect of ASO treatment on HDL and LDL cholesterol levels in
transgenic mice

| | | HDL | | | | SEQ |
|---|---|---|---|---|---|---|
| | Dose | % | LDL | 3′ | Internucleoside | ID |
| ASO | (mg/kg) | PBS | % PBS | Conjugate | Linkage/Length | No. |
| PBS | 0 | 131 | 90 | — | — | |
| ISIS | 1 | 130 | 72 | None | PS/20 | 2248 |
| 304801 | 3 | 186 | 79 | | | |
| | 10 | 226 | 63 | | | |
| | 30 | 240 | 46 | | | |
| ISIS | 0.3 | 98 | 86 | GalNAc₃-1 | PS/20 | 2249 |
| 647535 | 1 | 214 | 67 | | | |
| | 3 | 212 | 39 | | | |
| | 10 | 218 | 35 | | | |
| ISIS | 0.3 | 143 | 89 | GalNAc₃-1 | PS/PO/20 | 2249 |
| 647536 | 1 | 187 | 56 | | | |
| | 3 | 213 | 33 | | | |
| | 10 | 221 | 34 | | | |

[0782] These results confirm that the GalNAc₃-1 conjugate improves potency of an antisense compound. The results also show equal potency of a GalNAc₃-1 conjugated antisense compounds where the antisense oligonucleotides have mixed linkages (ISIS 647536 which has six phosphodiester linkages) and a full phosphorothioate version of the same antisense compound (ISIS 647535).

[0783] Phosphorothioate linkages provide several properties to antisense compounds. For example, they resist nuclease digestion and they bind proteins resulting in accumulation of compound in the liver, rather than in the kidney/urine. These are desirable properties, particularly when treating an indication in the liver. However, phosphorothioate linkages have also been associated with an inflammatory response. Accordingly, reducing the number of phosphorothioate linkages in a compound is expected to reduce the risk of inflammation, but also lower concentration of the compound in liver, increase concentration in the kidney and urine, decrease stability in the presence of nucleases, and lower overall potency. The present results show that a GalNAc₃-1 conjugated antisense compound where certain phosphorothioate linkages have been replaced with phosphodiester linkages is as potent against a target in the liver as a counterpart having full phosphorothioate linkages. Such compounds are expected to be less proinflammatory (See Example 24 describing an experiment showing reduction of PS results in reduced inflammatory effect).

### Example 22: Effect of GalNAc₃-1 Conjugated Modified ASO Targeting SRB-1 In Vivo

[0784] ISIS 440762 and 651900, each targeting SRB-1 and described in Table 17, were evaluated in a dose-dependent study for their ability to inhibit SRB-1 in Balb/c mice.

### Treatment

[0785] Six week old male Balb/c mice (Jackson Laboratory, Bar Harbor, ME) were injected subcutaneously once at the dosage shown below with ISIS 440762, 651900 or with PBS treated control. Each treatment group consisted of 4 animals. The mice were sacrificed 48 hours following the final administration to determine the SRB-1 mRNA levels in liver using real-time PCR and RIBOGREEN® RNA quantification reagent (Molecular Probes, Inc. Eugene, OR) according to standard protocols. SRB-1 mRNA levels were determined relative to total RNA (using Ribogreen), prior to normalization to PBS-treated control. The results below are presented as the average percent of SRB-1 mRNA levels for each treatment group, normalized to PBS-treated control and is denoted as “% PBS”.

[0786] As illustrated in Table 29, both antisense compounds lowered SRB-1 mRNA levels. Further, the antisense compound comprising the GalNAc₃-1 conjugate (ISIS 651900) was substantially more potent than the antisense compound lacking the GalNAc₃-1 conjugate (ISIS 440762). These results demonstrate that the potency benefit of GalNAc₃-1 conjugates are observed using antisense oligonucleotides complementary to a different target and having different chemically modified nucleosides, in this instance modified nucleosides comprise constrained ethyl sugar moieties (a bicyclic sugar moiety).

TABLE 29
Effect of ASO treatment on SRB-1 mRNA levels in Balb/c mice

| | Dose | | | | | SEQ |
|---|---|---|---|---|---|---|
| | (mg/ | Liver | ED₅₀ | 3′ | Internucleoside | ID |
| ASO | kg) | % PBS | (mg/kg) | Conjugate | linkage/Length | No. |
| PBS | 0 | 100 | | — | — | |
| ISIS | 0.7 | 85 | 2.2 | None | PS/14 | 2250 |
| 440762 | 2 | 55 | | | | |
| | 7 | 12 | | | | |
| | 20 | 3 | | | | |
| ISIS | 0.07 | 98 | 0.3 | GalNAc₃-1 | PS/14 | 2251 |
| 651900 | 0.2 | 63 | | | | |
| | 0.7 | 20 | | | | |
| | 2 | 6 | | | | |
| | 7 | 5 | | | | |

### Example 23: Human Peripheral Blood Mononuclear Cells (hPBMC) Assay Protocol

[0787] The hPBMC assay was performed using BD Vautainer CPT tube method. A sample of whole blood from volunteered donors with informed consent at US HealthWorks clinic (Faraday & El Camino Real, Carlsbad) was obtained and collected in 4-15 BD Vacutainer CPT 8 ml tubes (VWR Cat. #BD362753). The approximate starting total whole blood volume in the CPT tubes for each donor was recorded using the PBMC assay data sheet.

[0788] The blood sample was remixed immediately prior to centrifugation by gently inverting tubes 8-10 times. CPT tubes were centrifuged at rt (18-25° C.) in a horizontal (swing-out) rotor for 30 min. at 1500-1800 RCF with brake off (2700 RPM Beckman Allegra 6R). The cells were retrieved from the buffy coat interface (between Ficoll and polymer gel layers); transferred to a sterile 50 ml conical tube and pooled up to 5 CPT tubes/50 ml conical tube/donor. The cells were then washed twice with PBS (Ca⁺⁺, Mg⁺⁺ free; GIBCO). The tubes were topped up to 50 ml and mixed by inverting several times. The sample was then centrifuged at 330×g for 15 minutes at rt (1215 RPM in Beckman Allegra 6R) and aspirated as much supernatant as possible without disturbing pellet. The cell pellet was dislodged by gently swirling tube and resuspended cells in RPMI+10% FBS+pen/strep (˜1 ml/10 ml starting whole blood volume). A 60 μl sample was pipette into a sample vial (Beckman Coulter) with 600 μl VersaLyse reagent (Beckman Coulter Cat #A09777) and was gently vortexed for 10-15 sec. The sample was allowed to incubate for 10 min. at rt and being mixed again before counting. The cell suspension was counted on Vicell XR cell viability analyzer (Beckman Coulter) using PBMC cell type (dilution factor of 1:11 was stored with other parameters). The live cell/ml and viability were recorded. The cell suspension was diluted to 1×10⁷ live PBMC/ml in RPMI+10% FBS+pen/strep. The cells were plated at 5×10⁵ in 50 μl/well of 96-well tissue culture plate (Falcon Microtest). 50 μl/well of 2× concentration oligos/controls diluted in RPMI+10% FBS+pen/strep, was added according to experiment template (100 μl/well total). Plates were placed on the shaker and allowed to mix for approx. 1 min. After being incubated for 24 hrs at 37° C.; 5% CO₂, the plates were centrifuged at 400×g for 10 minutes before removing the supernatant for MSD cytokine assay (i.e. human IL-6, IL-10, IL-8 and MCP-1).

### Example 24: Evaluation of Proinflammatory Effects in hPBMC Assay for GalNAc₃-1 Conjugated ASOs

[0789] The antisense oligonucleotides (ASOs) listed in Table 30 were evaluated for proinflammatory effect in hPBMC assay using the protocol described in Example 23. ISIS 353512 is an internal standard known to be a high responder for IL-6 release in the assay. The hPBMCs were isolated from fresh, volunteered donors and were treated with ASOs at 0, 0.0128, 0.064, 0.32, 1.6, 8, 40 and 200 μM concentrations. After a 24 hr treatment, the cytokine levels were measured.

[0790] The levels of IL-6 were used as the primary readout. The EC₅₀ and Eₘₐₓ was calculated using standard procedures. Results are expressed as the average ratio of Eₘₐₓ/EC₅₀ from two donors and is denoted as “Eₘₐₓ/EC₅₀.” The lower ratio indicates a relative decrease in the proinflammatory response and the higher ratio indicates a relative increase in the proinflammatory response.

[0791] With regard to the test compounds, the least proinflammatory compound was the PS/PO linked ASO (ISIS 616468). The GalNAc₃-1 conjugated ASO, ISIS 647535 was slightly less proinflammatory than its non-conjugated counterpart ISIS 304801. These results indicate that incorporation of some PO linkages reduces proinflammatory reaction and addition of a GalNAc₃-1 conjugate does not make a compound more proinflammatory and may reduce proinflammatory response. Accordingly, one would expect that an antisense compound comprising both mixed PS/PO linkages and a GalNAc₃-1 conjugate would produce lower proinflammatory responses relative to full PS linked antisense compound with or without a GalNAc₃-1 conjugate. These results show that GalNAc₃-1 conjugated antisense compounds, particularly those having reduced PS content are less proinflammatory.

[0792] Together, these results suggest that a GalNAc₃-1 conjugated compound, particularly one with reduced PS content, can be administered at a higher dose than a counterpart full PS antisense compound lacking a GalNAc₃-1 conjugate. Since half-life is not expected to be substantially different for these compounds, such higher administration would result in less frequent dosing. Indeed such administration could be even less frequent, because the GalNAc₃-1 conjugated compounds are more potent (See Examples 20-22) and re-dosing is necessary once the concentration of a compound has dropped below a desired level, where such desired level is based on potency.

TABLE 30
Modified ASOs

| | | | SEQ |
|---|---|---|---|
| | Sequence | | ID |
| ASO | (5′ to 3′) | Target | No. |
| ISIS | Gₑₛ^{m}CₑₛTₑₛGₑₛAₑₛT_{ds} | TNFα | 2252 |
| 104838 | T_{ds}A_{ds}G_{ds}A_{ds}G_{ds}A_{ds}G_{ds} | | |
| | A_{ds}G_{ds}GₑₛTₑₛ^{m}Cₑₛ^{m}Cₑₛ | | |
| | ^{m}Cₑ | | |
| ISIS | Tₑₛ^{m}Cₑₛ^{m}Cₑₛ^{m}C_{ds}A_{ds}T_{ds} | CRP | 2253 |
| 353512 | T_{ds}T_{ds}^{m}C_{ds}A_{ds}G_{ds}G_{ds}A_{ds} | | |
| | G_{ds}A_{ds}^{m}C_{ds}^{m}C_{ds}TₑₛGₑₛGₑ | | |
| ISIS | AₑₛGₑₛ^{m}CₑₛTₑₛTₑₛ^{m}C_{ds}T_{ds} | ApoC | 2248 |
| 304801 | T_{ds}G_{ds}T_{ds}^{m}C_{ds}^{m}C_{ds}A_{ds}G_{ds} | III | |
| | ^{m}C_{ds}TₑₛTₑₛTₑₛAₑₛTₑ | | |
| ISIS | AₑₛGₑₛ^{m}CₑₛTₑₛTₑₛ^{m}C_{ds}T_{ds} | ApoC | 2249 |
| 647535 | T_{ds}G_{ds}T_{ds}^{m}C_{ds}^{m}C_{ds}A_{ds}G_{ds} | III | |
| | ^{m}C_{ds}TₑₛTₑₛTₑₛAₑₛTₑₒ | | |
| | A_{do'}-GalNAC₃-1ₐ | | |
| ISIS | AₑₛGₑₒ^{m}CₑₒTₑₒTₑₒ^{m}C_{ds}T_{ds} | ApoC | 2248 |
| 616468 | T_{ds}G_{ds}T_{ds}^{m}C_{ds}^{m}C_{ds}A_{ds}G_{ds} | III | |
| | ^{m}C_{ds}TₑₒTₑₒTₑₛAₑₛTₑ | | |

[0793] Subscripts: “e” indicates 2′-MOE modified nucleoside; “d” indicates β-D-2′-deoxyribonucleoside; “k” indicates 6′-(S)—CH₃ bicyclic nucleoside (e.g. cEt); “s” indicates phosphorothioate internucleoside linkages (PS); “o” indicates phosphodiester internucleoside linkages (PO); and “o′” indicates —O—P(═O)(OH)—. Superscript “in” indicates 5-methylcytosines. “A_{do′}-GalNAc₃-1ₐ” indicates a conjugate having the structure GalNAc₃-1 shown in Example 9 attached to the 3′-end of the antisense oligonucleotide, as indicated.

TABLE 31
Proinflammatory Effect of ASOs targeting ApoC III in hPBMC assay

| | | | | | | SEQ |
|---|---|---|---|---|---|---|
| | EC₅₀ | Eₘₐₓ | Eₘₐₓ/ | 3′ | Internucleoside | ID |
| ASO | (μM) | (μM) | EC₅₀ | Conjugate | Linkage/Length | No. |
| ISIS | 0.01 | 265.9 | 26,590 | None | PS/20 | 2253 |
| 353512 | | | | | | |
| (high | | | | | | |
| responder) | | | | | | |
| ISIS | 0.07 | 106.55 | 1,522 | None | PS/20 | 2248 |
| 304801 | | | | | | |
| ISIS | 0.12 | 138 | 1,150 | GalNAc₃- | PS/20 | 2249 |
| 647535 | | | | 1 | | |
| ISIS | 0.32 | 71.52 | 224 | None | PS/PO/20 | 2248 |
| 616468 | | | | | | |

### Example 25: Effect of GalNAc₃-1 Conjugated Modified ASO Targeting Human ApoC III In Vitro

[0794] ISIS 304801 and 647535 described above were tested in vitro. Primary hepatocyte cells from transgenic mice at a density of 25,000 cells per well were treated with 0.03,0.08, 0.24, 0.74, 2.22, 6.67 and 20 μM concentrations of modified oligonucleotides. After a treatment period of approximately 16 hours, RNA was isolated from the cells and mRNA levels were measured by quantitative real-time PCR and the hApoC III mRNA levels were adjusted according to total RNA content, as measured by RIBOGREEN.

[0795] The IC₅₀ was calculated using the standard methods and the results are presented in Table 32. As illustrated, comparable potency was observed in cells treated with ISIS 647535 as compared to the control, ISIS 304801.

TABLE 32
Modified ASO targeting human ApoC III in primary hepatocytes

| | | | Internucleoside | SEQ |
|---|---|---|---|---|
| ASO | IC₅₀ (μM) | 3′ Conjugate | linkage/Length | ID No. |
| ISIS | 0.44 | None | PS/20 | 2248 |
| 304801 | | | | |
| ISIS | 0.31 | GalNAc₃-1 | PS/20 | 2249 |
| 647535 | | | | |

[0796] In this experiment, the large potency benefits of GalNAc₃-1 conjugation that are observed in vivo were not observed in vitro. Subsequent free uptake experiments in primary hepatocytes in vitro did show increased potency of oligonucleotides comprising various GalNAc conjugates relative to oligonucleotides that lacking the GalNAc conjugate. (see Examples 60, 82, and 92)

### Example 26: Effect of PO/PS linkages on ApoC III ASO Activity

[0797] Human ApoC III transgenic mice were injected intraperitoneally once at 25 mg/kg of ISIS 304801, or ISIS 616468 (both described above) or with PBS treated control once per week for two weeks. The treatment group consisted of 3 animals and the control group consisted of 4 animals. Prior to the treatment as well as after the last dose, blood was drawn from each mouse and plasma samples were analyzed. The mice were sacrificed 72 hours following the last administration.

[0798] Samples were collected and analyzed to determine the ApoC III protein levels in the liver as described above (Example 20). Data from those analyses are presented in Table 33, below.

[0799] These results show reduction in potency for antisense compounds with PO/PS (ISIS 616468) in the wings relative to full PS (ISIS 304801).

TABLE 33
Effect of ASO treatment on ApoC III protein levels in human
ApoC III transgenic mice

| | Dose | % | 3′ | Internucleoside | SEQ ID |
|---|---|---|---|---|---|
| ASO | (mg/kg) | PBS | Conjugate | linkage/Length | No. |
| PBS | 0 | 99 | — | — | |
| ISIS | 25 | 24 | None | Full PS | 2248 |
| 304801 | mg/kg/wk | | | | |
| | for 2 wks | | | | |
| ISIS | 25 | 40 | None | 14 PS/6 PO | 2248 |
| 616468 | mg/kg/wk | | | | |
| | for 2 wks | | | | |

### Example 27: Compound 56

[chemical structure]

[0800] Compound 56 is commercially available from Glen Research or may be prepared according to published procedures reported by Shchepinov et al., Nucleic Acids Research, 1997, 25(22), 4447-4454.

### Example 28: Preparation of Compound 60

[chemical structure]

[0801] Compound 4 was prepared as per the procedures illustrated in Example 2. Compound 57 is commercially available. Compound 60 was confirmed by structural analysis.

[0802] Compound 57 is meant to be representative and not intended to be limiting as other monoprotected substituted or unsubstituted alkyl diols including but not limited to those presented in the specification herein can be used to prepare phosphoramidites having a predetermined composition.

### Example 29: Preparation of Compound 63

[chemical structure]

[0803] Compounds 61 and 62 are prepared using procedures similar to those reported by Tober et al., Eur. J. Org. Chem., 2013, 3, 566-577; and Jiang et al., Tetrahedron, 2007, 63(19), 3982-3988. Alternatively, Compound 63 is prepared using procedures similar to those reported in scientific and patent literature by Kim et al., Synlett, 2003, 12, 1838-1840; and Kim et al., published PCT International Application, WO 2004063208.

### Example 30: Preparation of Compound 63b

[chemical structure]

[0804] Compound 63a is prepared using procedures similar to those reported by Hanessian et al., Canadian Journal of Chemistry, 1996, 74(9), 1731-1737.

### Example 31: Preparation of Compound 63d

[chemical structure]

[0805] Compound 63c is prepared using procedures similar to those reported by Chen et al., Chinese Chemical Letters, 1998, 9(5), 451-453.

### Example 32: Preparation of Compound 67

[chemical structure]

[0806] Compound 64 was prepared as per the procedures illustrated in Example 2. Compound 65 is prepared using procedures similar to those reported by Or et al., published PCT International Application, WO 2009003009. The protecting groups used for Compound 65 are meant to be representative and not intended to be limiting as other protecting groups including but not limited to those presented in the specification herein can be used.

### Example 33: Preparation of Compound 70

[chemical structure]

[0807] Compound 64 was prepared as per the procedures illustrated in Example 2. Compound 68 is commercially available. The protecting group used for Compound 68 is meant to be representative and not intended to be limiting as other protecting groups including but not limited to those presented in the specification herein can be used.

### Example 34: Preparation of Compound 75a

[chemical structure]

[0808] Compound 75 is prepared according to published procedures reported by Shchepinov et al., Nucleic Acids Research, 1997, 25(22), 4447-4454.

### Example 35: Preparation of Compound 79

[chemical structure]

[0809] Compound 76 was prepared according to published procedures reported by Shchepinov et al., Nucleic Acids Research, 1997, 25(22), 4447-4454.

### Example 36: Preparation of Compound 79a

[chemical structure]

[0810] Compound 77 is prepared as per the procedures illustrated in Example 35.

### Example 37: General Method for the Preparation of Conjugated Oligomeric Compound 82 Comprising a Phosphodiester Linked GalNAc₃-2 Conjugate at 5′ Terminus Via Solid Support (Method I)

[chemical structure]

[0811] wherein GalNAc₃-2 has the structure:

[chemical structure]

[0812] The GalNAc₃ cluster portion of the conjugate group GalNAc₃-2 (GalNAc₃-2ₐ) can be combined with any cleavable moiety to provide a variety of conjugate groups. Wherein GalNAc₃-2ₐ has the formula:

[chemical structure]

[0813] The VIMAD-bound oligomeric compound 79b was prepared using standard procedures for automated DNA/RNA synthesis (see Dupouy et al., Angew. Chem. Int. Ed., 2006, 45, 3623-3627). The phosphoramidite Compounds 56 and 60 were prepared as per the procedures illustrated in Examples 27 and 28, respectively. The phosphoramidites illustrated are meant to be representative and not intended to be limiting as other phosphoramidite building blocks including but not limited those presented in the specification herein can be used to prepare an oligomeric compound having a phosphodiester linked conjugate group at the 5′ terminus. The order and quantity of phosphoramidites added to the solid support can be adjusted to prepare the oligomeric compounds as described herein having any predetermined sequence and composition.

### Example 38: Alternative Method for the Preparation of Oligomeric Compound 82 Comprising a Phosphodiester Linked GalNAc₃-2 Conjugate at 5′ Terminus (Method II)

[chemical structure]

[0814] The VIMAD-bound oligomeric compound 79b was prepared using standard procedures for automated DNA/RNA synthesis (see Dupouy et al., Angew. Chem. Int. Ed., 2006, 45, 3623-3627). The GalNAc₃-2 cluster phosphoramidite, Compound 79 was prepared as per the procedures illustrated in Example 35. This alternative method allows a one-step installation of the phosphodiester linked GalNAc₃-2 conjugate to the oligomeric compound at the final step of the synthesis. The phosphoramidites illustrated are meant to be representative and not intended to be limiting, as other phosphoramidite building blocks including but not limited to those presented in the specification herein can be used to prepare oligomeric compounds having a phosphodiester conjugate at the 5′ terminus. The order and quantity of phosphoramidites added to the solid support can be adjusted to prepare the oligomeric compounds as described herein having any predetermined sequence and composition.

### Example 39: General Method for the Preparation of Oligomeric Compound 83h Comprising a GalNAc₃-3 Conjugate at the 5′ Terminus (GalNAc₃-1 Modified for 5′ End Attachment) Via Solid Support

[chemical structure]

[chemical structure]

[chemical structure]

[0815] Compound 18 was prepared as per the procedures illustrated in Example 4. Compounds 83a and 83b are commercially available. Oligomeric Compound 83e comprising a phosphodiester linked hexylamine was prepared using standard oligonucleotide synthesis procedures. Treatment of the protected oligomeric compound with aqueous ammonia provided the 5′-GalNAc₃-3 conjugated oligomeric compound (83h).

[0816] Wherein GalNAc₃-3 has the structure:

[chemical structure]

[0817] The GalNAc₃ cluster portion of the conjugate group GalNAc₃-3 (GalNAc₃-3ₐ) can be combined with any cleavable moiety to provide a variety of conjugate groups. Wherein GalNAc₃-3ₐ has the formula:

[chemical structure]

### Example 40: General Method for the Preparation of Oligomeric Compound 89 Comprising a Phosphodiester Linked GalNAc₃-4 Conjugate at the 3′ Terminus Via Solid Support

[chemical structure]

Wherein GalNAc₃-4 has the structure:

[chemical structure]

[0818] Wherein CM is a cleavable moiety. In certain embodiments, cleavable moiety is:

[chemical structure]

[0819] The GalNAc₃ cluster portion of the conjugate group GalNAc₃-4 (GalNAc₃-4ₐ) can be combined with any cleavable moiety to provide a variety of conjugate groups. Wherein GalNAc₃-4ₐ has the formula:

[chemical structure]

[0820] The protected Unylinker functionalized solid support Compound 30 is commercially available. Compound 84 is prepared using procedures similar to those reported in the literature (see Shchepinov et al., Nucleic Acids Research, 1997, 25(22), 4447-4454; Shchepinov et al., Nucleic Acids Research, 1999, 27, 3035-3041; and Hornet et al., Nucleic Acids Research, 1997, 25, 4842-4849). The phosphoramidite building blocks, Compounds 60 and 79a are prepared as per the procedures illustrated in Examples 28 and 36. The phosphoramidites illustrated are meant to be representative and not intended to be limiting as other phosphoramidite building blocks can be used to prepare an oligomeric compound having a phosphodiester linked conjugate at the 3′ terminus with a predetermined sequence and composition. The order and quantity of phosphoramidites added to the solid support can be adjusted to prepare the oligomeric compounds as described herein having any predetermined sequence and composition.

### Example 41: General Method for the Preparation of ASOs Comprising a Phosphodiester Linked GalNAc₃-2 (See Example 37, Bx is Adenine) Conjugate at the 5′ Position Via Solid Phase Techniques (Preparation of ISIS 661134)

[0821] Unless otherwise stated, all reagents and solutions used for the synthesis of oligomeric compounds are purchased from commercial sources. Standard phosphoramidite building blocks and solid support are used for incorporation nucleoside residues which include for example T, A, G, and ^{m}C residues. Phosphoramidite compounds 56 and 60 were used to synthesize the phosphodiester linked GalNAc₃-2 conjugate at the 5′ terminus. A 0.1 M solution of phosphoramidite in anhydrous acetonitrile was used for β-D-2′-deoxyribonucleoside and 2′-MOE.

[0822] The ASO syntheses were performed on ABI 394 synthesizer (1-2 μmol scale) or on GE Healthcare Bioscience AKTA oligopilot synthesizer (40-200 μmol scale) by the phosphoramidite coupling method on VIMAD solid support (110 μmol/g, Guzaev et al., 2003) packed in the column. For the coupling step, the phosphoramidites were delivered at a 4 fold excess over the initial loading of the solid support and phosphoramidite coupling was carried out for 10 min. All other steps followed standard protocols supplied by the manufacturer. A solution of 6% dichloroacetic acid in toluene was used for removing the dimethoxytrityl (DMT) groups from 5′-hydroxyl groups of the nucleotide. 4,5-Dicyanoimidazole (0.7 M) in anhydrous CH₃CN was used as activator during the coupling step. Phosphorothioate linkages were introduced by sulfurization with 0.1 M solution of xanthane hydride in 1:1 pyridine/CH₃CN for a contact time of 3 minutes. A solution of 20% tert-butylhydroperoxide in CH₃CN containing 6% water was used as an oxidizing agent to provide phosphodiester internucleoside linkages with a contact time of 12 minutes.

[0823] After the desired sequence was assembled, the cyanoethyl phosphate protecting groups were deprotected using a 20% diethylamine in toluene (v/v) with a contact time of 45 minutes. The solid-support bound ASOs were suspended in aqueous ammonia (28-30 wt %) and heated at 55° C. for 6 h. The unbound ASOs were then filtered and the ammonia was boiled off. The residue was purified by high pressure liquid chromatography on a strong anion exchange column (GE Healthcare Bioscience, Source 30Q, 30 μm, 2.54×8 cm, A=100 mM ammonium acetate in 30% aqueous CH₃CN, B=1.5 M NaBr in A, 0-40% of B in 60 min, flow 14 mL min-1, λ=260 nm). The residue was desalted by HPLC on a reverse phase column to yield the desired ASOs in an isolated yield of 15-30% based on the initial loading on the solid support. The ASOs were characterized by ion-pair-HPLC coupled MS analysis with Agilent 1100 MSD system.

TABLE 34
ASO comprising a phosphodiester linked
GalNAc₃-2 conjugate at the 5′ position
targeting SRB-1

| | | | Ob- | SEQ |
|---|---|---|---|---|
| ISIS | Sequence | CalCd | served | ID |
| No. | (5′ to 3′) | Mass | Mass | No. |
| 661134 | GalNAc₃-2_{a-o'}A_{do} | 6482.2 | 6481.6 | 2254 |
| | Tₖₛ^{m}CₖₛA_{ds}G_{ds}T_{ds} | | | |
| | ^{m}C_{ds}A_{ds}T_{ds}G_{ds}A_{ds} | | | |
| | ^{m}C_{ds}T_{ds}Tₖₛ^{m}Cₖ | | | |

[0824] Subscripts: “e” indicates 2′-MOE modified nucleoside; “d” indicates β-D-2′-deoxyribonucleoside; “k” indicates 6′-(S)—CH₃ bicyclic nucleoside (e.g. cEt); “s” indicates phosphorothioate internucleoside linkages (PS); “o” indicates phosphodiester internucleoside linkages (PO); and “o′” indicates —O—P(═O)(OH)—. Superscript “m” indicates 5-methylcytosines. The structure of GalNAc₃-2ₐ is shown in Example 37.

### Example 42: General Method for the Preparation of ASOs Comprising a GalNAc₃-3 Conjugate at the 5′ Position Via Solid Phase Techniques (Preparation of ISIS 661166)

[0825] The synthesis for ISIS 661166 was performed using similar procedures as illustrated in Examples 39 and 41.

[0826] ISIS 661166 is a 5-10-5 MOE gapmer, wherein the 5′ position comprises a GalNAc₃-3 conjugate. The ASO was characterized by ion-pair-HPLC coupled MS analysis with Agilent 1100 MSD system.

TABLE 34a
ASO comprising a GalNAc₃-3 conjugate at
the 5′ position via a hexylamino
phosphodiester linkage targeting Malat-1

| | | | | Ob- | SEQ |
|---|---|---|---|---|---|
| ISIS | Sequence | Con- | Calcd | served | ID |
| No. | (5′ to 3′) | jugate | Mass | Mass | No. |
| 661166 | 5′-GalNAC₃- | 5′- | 8992.16 | 8990.51 | 2255 |
| | 3_{a-o'}^{m}CₑₛGₑₛ | GalNAc₃- | | | |
| | GₑₛTₑₛGₑₛ^{m}C_{ds} | 3 | | | |
| | A_{ds}A_{ds}G_{ds}G_{ds} | | | | |
| | ^{m}C_{ds}T_{ds}T_{ds}A_{ds} | | | | |
| | G_{ds}GₑₛAₑₛAₑₛ | | | | |
| | TₑₛTₑ | | | | |

[0827] Subscripts: “e” indicates 2′-MOE modified nucleoside; “d” indicates β-D-2′-deoxyribonucleoside; “s” indicates phosphorothioate internucleoside linkages (PS); “o” indicates phosphodiester internucleoside linkages (PO); and “o′” indicates —O—P(═O)(OH)—. Superscript “m” indicates 5-methylcytosines. The structure of “5′-GalNAc₃-3a” is shown in Example 39.

### Example 43: Dose-Dependent Study of Phosphodiester Linked GalNAc₃-2 (See Examples 37 and 41, Bx is Adenine) at the 5′ Terminus Targeting SRB-1 In Vivo

[0828] ISIS 661134 (see Example 41) comprising a phosphodiester linked GalNAc₃-2 conjugate at the 5′ terminus was tested in a dose-dependent study for antisense inhibition of SRB-1 in mice. Unconjugated ISIS 440762 and 651900 (GalNAc₃-1 conjugate at 3′ terminus, see Example 9) were included in the study for comparison and are described previously in Table 17.

### Treatment

[0829] Six week old male Balb/c mice (Jackson Laboratory, Bar Harbor, ME) were injected subcutaneously once at the dosage shown below with ISIS 440762, 651900, 661134 or with PBS treated control. Each treatment group consisted of 4 animals. The mice were sacrificed 72 hours following the final administration to determine the liver SRB-1 mRNA levels using real-time PCR and RIBOGREEN® RNA quantification reagent (Molecular Probes, Inc. Eugene, OR) according to standard protocols. SRB-1 mRNA levels were determined relative to total RNA (using Ribogreen), prior to normalization to PBS-treated control. The results below are presented as the average percent of SRB-1 mRNA levels for each treatment group, normalized to PBS-treated control and is denoted as “% PBS”. The ED₅₀s were measured using similar methods as described previously and are presented below.

[0830] As illustrated in Table 35, treatment with antisense oligonucleotides lowered SRB-1 mRNA levels in a dose-dependent manner. Indeed, the antisense oligonucleotides comprising the phosphodiester linked GalNAc₃-2 conjugate at the 5′ terminus (ISIS 661134) or the GalNAc₃-1 conjugate linked at the 3′ terminus (ISIS 651900) showed substantial improvement in potency compared to the unconjugated antisense oligonucleotide (ISIS 440762). Further, ISIS 661134, which comprises the phosphodiester linked GalNAc₃-2 conjugate at the 5′ terminus was equipotent compared to ISIS 651900, which comprises the GalNAc₃-1 conjugate at the 3′ terminus.

TABLE 35
ASOs containing GalNAc₃-1 or GalNAc₃-2 targeting SRB-1

| ISIS | Dosage | SRB-1 mRNA | ED50 | | SEQ |
|---|---|---|---|---|---|
| No. | (mg/kg) | levels (% PBS) | (mg/kg) | Conjugate | ID No. |
| PBS | 0 | 100 | — | — | |
| 440762 | 0.2 | 116 | 2.58 | No conjugate | 2250 |
| | 0.7 | 91 | | | |
| | 2 | 69 | | | |
| | 7 | 22 | | | |
| | 20 | 5 | | | |
| | 0.07 | 95 | | | |
| 651900 | 0.2 | 77 | 0.26 | 3′ GalNAc₃-1 | 2251 |
| | 0.7 | 28 | | | |
| | 2 | 11 | | | |
| | 7 | 8 | | | |
| | 0.07 | 107 | | | |
| 661134 | 0.2 | 86 | 0.25 | 5′ GalNAc₃-2 | 2254 |
| | 0.7 | 28 | | | |
| | 2 | 10 | | | |
| | 7 | 6 | | | |

### Pharmacokinetics Analysis (PK)

[0831] The PK of the ASOs from the high dose group (7 mg/kg) was examined and evaluated in the same manner as illustrated in Example 20. Liver sample was minced and extracted using standard protocols. The full length metabolites of 661134 (5′ GalNAc₃-2) and ISIS 651900 (3′ GalNAc₃-1) were identified and their masses were confirmed by high resolution mass spectrometry analysis. The results showed that the major metabolite detected for the ASO comprising a phosphodiester linked GalNAc₃-2 conjugate at the 5′ terminus (ISIS 661134) was ISIS 440762 (data not shown). No additional metabolites, at a detectable level, were observed. Unlike its counterpart, additional metabolites similar to those reported previously in Table 23a were observed for the ASO having the GalNAc₃-1 conjugate at the 3′ terminus (ISIS 651900). These results suggest that having the phosphodiester linked GalNAc₃-1 or GalNAc₃-2 conjugate may improve the PK profile of ASOs without compromising their potency.

### Example 44: Effect of PO/PS Linkages on Antisense Inhibition of ASOs Comprising GalNAc₃-1 Conjugate (See Example 9) at the 3′ Terminus Targeting SRB-1

[0832] ISIS 655861 and 655862 comprising a GalNAc₃-1 conjugate at the 3′ terminus each targeting SRB-1 were tested in a single administration study for their ability to inhibit SRB-1 in mice. The parent unconjugated compound, ISIS 353382 was included in the study for comparison.

[0833] The ASOs are 5-10-5 MOE gapmers, wherein the gap region comprises ten 2′-deoxyribonucleosides and each wing region comprises five 2′-MOE modified nucleosides. The ASOs were prepared using similar methods as illustrated previously in Example 19 and are described Table 36, below.

TABLE 36
Modified ASOs comprising GalNAc₃-1
conjugate at the 3′ terminus targeting SRB-1

| | | | SEQ |
|---|---|---|---|
| ISIS | Sequence | | ID |
| No. | (5′ to 3′) | Chemistry | No. |
| 353382 | Gₑₛ^{m}CₑₛTₑₛTₑₛ^{m}Cₑₛ | Full PS no | 2256 |
| (parent) | A_{ds}G_{ds}T_{ds}^{m}C_{ds}A_{ds} | conjugate | |
| | T_{ds}G_{ds}A_{ds}^{m}C_{ds}T_{ds} | | |
| | Tₑₛ^{m}Cₑₛ^{m}CₑₛTₑₛTₑ | | |
| 655861 | Gₑₛ^{m}CₑₛTₑₛTₑₛ^{m}Cₑₛ | Full PS with | 2257 |
| | A_{ds}G_{ds}T_{ds}^{m}C_{ds}A_{ds} | GalNAc₃-1 | |
| | T_{ds}G_{ds}A_{ds}^{m}C_{ds}T_{ds} | conjugate | |
| | Tₑₛ^{m}Cₑₛ^{m}CₑₛTₑₛTₑₒ | | |
| | A_{do'}-GalNAC₃-1ₐ | | |
| 655862 | Gₑₛ^{m}CₑₒTₑₒTₑₒ^{m}Cₑₒ | Mixed PS/PO | 2257 |
| | A_{ds}G_{ds}T_{ds}^{m}C_{ds}A_{ds} | with GalNAc₃-1 | |
| | T_{ds}G_{ds}A_{ds}^{m}C_{ds}T_{ds} | conjugate | |
| | Tₑₒ^{m}Cₑₒ^{m}CₑₛTₑₛTₑₒ | | |
| | A_{do'}-GalNAC₃-1ₐ | | |

[0834] Subscripts: “e” indicates 2′-MOE modified nucleoside; “d” indicates β-D-2′-deoxyribonucleoside; “s” indicates phosphorothioate internucleoside linkages (PS); “o” indicates phosphodiester internucleoside linkages (PO); and “o′” indicates —O—P(═O)(OH)—. Superscript “m” indicates 5-methylcytosines. The structure of “GalNAc₃-1” is shown in Example 9.

### Treatment

[0835] Six week old male Balb/c mice (Jackson Laboratory, Bar Harbor, ME) were injected subcutaneously once at the dosage shown below with ISIS 353382, 655861, 655862 or with PBS treated control. Each treatment group consisted of 4 animals. Prior to the treatment as well as after the last dose, blood was drawn from each mouse and plasma samples were analyzed. The mice were sacrificed 72 hours following the final administration to determine the liver SRB-1 mRNA levels using real-time PCR and RIBOGREEN® RNA quantification reagent (Molecular Probes, Inc. Eugene, OR) according to standard protocols. SRB-1 mRNA levels were determined relative to total RNA (using Ribogreen), prior to normalization to PBS-treated control. The results below are presented as the average percent of SRB-1 mRNA levels for each treatment group, normalized to PBS-treated control and is denoted as “% PBS”. The ED₅₀s were measured using similar methods as described previously and are reported below.

[0836] As illustrated in Table 37, treatment with antisense oligonucleotides lowered SRB-1 mRNA levels in a dose-dependent manner compared to PBS treated control. Indeed, the antisense oligonucleotides comprising the GalNAc₃-1 conjugate at the 3′ terminus (ISIS 655861 and 655862) showed substantial improvement in potency comparing to the unconjugated antisense oligonucleotide (ISIS 353382). Further, ISIS 655862 with mixed PS/PO linkages showed an improvement in potency relative to full PS (ISIS 655861).

TABLE 37
Effect of PO/PS linkages on antisense inhibition of ASOs
comprising GalNAc₃-1 conjugate at 3′ terminus targeting SRB-1

| ISIS | Dosage | SRB-1 mRNA | ED₅₀ | | SEQ ID |
|---|---|---|---|---|---|
| No. | (mg/kg) | levels (% PBS) | (mg/kg) | Chemistry | No. |
| PBS | 0 | 100 | — | — | |
| 353382 | 3 | 76.65 | 10.4 | Full PS without | 2256 |
| (parent) | 10 | 52.40 | | conjugate | |
| | 30 | 24.95 | | | |
| 655861 | 0.5 | 81.22 | 2.2 | Full PS with | 2257 |
| | 1.5 | 63.51 | | GalNAc₃-1 | |
| | 5 | 24.61 | | conjugate | |
| | 15 | 14.80 | | | |
| 655862 | 0.5 | 69.57 | 1.3 | Mixed PS/ | 2257 |
| | 1.5 | 45.78 | | PO with | |
| | 5 | 19.70 | | GalNAc₃-1 | |
| | 15 | 12.90 | | conjugate | |

[0837] Liver transaminase levels, alanine aminotransferase (ALT) and aspartate aminotransferase (AST), in serum were measured relative to saline injected mice using standard protocols. Organ weights were also evaluated. The results demonstrated that no elevation in transaminase levels (Table 38) or organ weights (data not shown) were observed in mice treated with ASOs compared to PBS control. Further, the ASO with mixed PS/PO linkages (ISIS 655862) showed similar transaminase levels compared to full PS (ISIS 655861).

TABLE 38
Effect of PO/PS linkages on transaminase
levels of ASOs comprising GalNAc₃-1
conjugate at 3′ terminus targeting SRB-1

| ISIS | Dosage | ALT | AST | | SEQ |
|---|---|---|---|---|---|
| No. | (mg/kg) | (U/L) | (U/L) | Chemistry | ID No. |
| PBS | 0 | 28.5 | 65 | — | |
| 353382 | 3 | 50.25 | 89 | Full PS without | 2256 |
| (parent) | 10 | 27.5 | 79.3 | conjugate | |
| | 30 | 27.3 | 97 | | |
| 655861 | 0.5 | 28 | 55.7 | Full PS with | 2257 |
| | 1.5 | 30 | 78 | GalNAc₃-1 | |
| | 5 | 29 | 63.5 | | |
| | 15 | 28.8 | 67.8 | | |
| 655862 | 0.5 | 50 | 75.5 | Mixed PS/ | 2257 |
| | 1.5 | 21.7 | 58.5 | PO with | |
| | 5 | 29.3 | 69 | GalNAc₃-1 | |
| | 15 | 22 | 61 | | |

### Example 45: Preparation of PFP Ester, Compound 110a

[chemical structure]

[chemical structure]

[0838] Compound 4 (9.5 g, 28.8 mmoles) was treated with compound 103a or 103b (38 mmoles), individually, and TMSOTf (0.5 eq.) and molecular sieves in dichloromethane (200 mL), and stirred for 16 hours at room temperature. At that time, the organic layer was filtered thru celite, then washed with sodium bicarbonate, water and brine. The organic layer was then separated and dried over sodium sulfate, filtered and reduced under reduced pressure. The resultant oil was purified by silica gel chromatography (2%->10% methanol/dichloromethane) to give compounds 104a and 104b in >80% yield. LCMS and proton NMR was consistent with the structure.

[0839] Compounds 104a and 104b were treated to the same conditions as for compounds 100a-d (Example 47), to give compounds 105a and 105b in >90% yield. LCMS and proton NMR was consistent with the structure.

[0840] Compounds 105a and 105b were treated, individually, with compound 90 under the same conditions as for compounds 901a-d, to give compounds 106a (80%) and 106b (20%). LCMS and proton NMR was consistent with the structure.

[0841] Compounds 106a and 106b were treated to the same conditions as for compounds 96a-d (Example 47), to give 107a (60%) and 107b (20%). LCMS and proton NMR was consistent with the structure.

[0842] Compounds 107a and 107b were treated to the same conditions as for compounds 97a-d (Example 47), to give compounds 108a and 108b in 40-60% yield. LCMS and proton NMR was consistent with the structure.

[0843] Compounds 108a (60%) and 108b (40%) were treated to the same conditions as for compounds 100a-d (Example 47), to give compounds 109a and 109b in >80% yields. LCMS and proton NMR was consistent with the structure.

[0844] Compound 109a was treated to the same conditions as for compounds 101a-d (Example 47), to give Compound 110a in 30-60% yield. LCMS and proton NMR was consistent with the structure. Alternatively, Compound 110b can be prepared in a similar manner starting with Compound 109b.

### Example 46: General Procedure for Conjugation with PFP Esters (Oligonucleotide 111); Preparation of ISIS 666881 (GalNAc₃-10)

[0845] A 5′-hexylamino modified oligonucleotide was synthesized and purified using standard solid-phase oligonucleotide procedures. The 5′-hexylamino modified oligonucleotide was dissolved in 0.1 M sodium tetraborate, pH 8.5 (200 μL) and 3 equivalents of a selected PFP esterified GalNAc₃ cluster dissolved in DMSO (50 μL) was added. If the PFP ester precipitated upon addition to the ASO solution DMSO was added until all PFP ester was in solution. The reaction was complete after about 16 h of mixing at room temperature. The resulting solution was diluted with water to 12 mL and then spun down at 3000 rpm in a spin filter with a mass cut off of 3000 Da. This process was repeated twice to remove small molecule impurities. The solution was then lyophilized to dryness and redissolved in concentrated aqueous ammonia and mixed at room temperature for 2.5 h followed by concentration in vacuo to remove most of the ammonia. The conjugated oligonucleotide was purified and desalted by RP-HPLC and lyophilized to provide the GalNAc₃ conjugated oligonucleotide.

[chemical structure]

[0846] Oligonucleotide 111 is conjugated with GalNAc₃-10. The GalNAc₃ cluster portion of the conjugate group GalNAc₃-10 (GalNAc₃-10ₐ) can be combined with any cleavable moiety to provide a variety of conjugate groups. In certain embodiments, the cleavable moiety is —P(═O)(OH)-A_{d}-P(═O)(OH)— as shown in the oligonucleotide (ISIS 666881) synthesized with GalNAc₃-10 below. The structure of GalNAc₃-10 (GalNAc₃-10, -CM-) is shown below:

[chemical structure]

[0847] Following this general procedure ISIS 666881 was prepared. 5′-hexylamino modified oligonucleotide, ISIS 660254, was synthesized and purified using standard solid-phase oligonucleotide procedures. ISIS 660254 (40 mg, 5.2 μmol) was dissolved in 0.1 M sodium tetraborate, pH 8.5 (200 μL) and 3 equivalents PFP ester (Compound 110a) dissolved in DMSO (50 μL) was added. The PFP ester precipitated upon addition to the ASO solution requiring additional DMSO (600 μL) to fully dissolve the PFP ester. The reaction was complete after 16 h of mixing at room temperature. The solution was diluted with water to 12 mL total volume and spun down at 3000 rpm in a spin filter with a mass cut off of 3000 Da. This process was repeated twice to remove small molecule impurities. The solution was lyophilized to dryness and redissolved in concentrated aqueous ammonia with mixing at room temperature for 2.5 h followed by concentration in vacuo to remove most of the ammonia. The conjugated oligonucleotide was purified and desalted by RP-HPLC and lyophilized to give ISIS 666881 in 90% yield by weight (42 mg, 4.7 μmol).

GalNAc₃-10 conjugated oligonucleotide

| | Sequence | | SEQ |
|---|---|---|---|
| ASO | (5′ to 3′) | 5′ group | ID No. |
| ISIS | NH₂(CH₂)₆₋ₒA_{do}Gₑₛ | Hexylamine | 2258 |
| 660254 | ^{m}CₑₛTₑₛTₑₛ^{m}CₑₛA_{ds}G_{ds} | | |
| | T_{ds}^{m}C_{ds}A_{ds}T_{ds}G_{ds}A_{ds} | | |
| | ^{m}C_{ds}T_{ds}Tₑₛ^{m}Cₑₛ^{m}Cₑₛ | | |
| | TₑₛTₑ | | |
| ISIS | GalNAc₃-10_{a-o'}A_{do} | GalNAc₃-10 | 2258 |
| 666881 | Gₑₛ^{m}CₑₛTₑₛTₑₛ^{m}CₑₛA_{ds} | | |
| | G_{ds}T_{ds}^{m}C_{ds}A_{ds}T_{ds}G_{ds} | | |
| | A_{ds}^{m}C_{ds}T_{ds}Tₑₛ^{m}Cₑₛ | | |
| | ^{m}CₑₛTₑₛTₑ | | |

[0848] Capital letters indicate the nucleobase for each nucleoside and mC indicates a 5-methyl cytosine. Subscripts: “e” indicates a 2′-MOE modified nucleoside; “d” indicates a β-D-2′-deoxyribonucleoside; “s” indicates a phosphorothioate internucleoside linkage (PS); “o” indicates a phosphodiester internucleoside linkage (PO); and “o′” indicates —O—P(═O)(OH)—. Conjugate groups are in bold.

### Example 47: Preparation of Oligonucleotide 102 Comprising GalNAc₃-8

[chemical structure]

[chemical structure]

[chemical structure]

[0849] The triacid 90 (4 g, 14.43 mmol) was dissolved in DMF (120 mL) and N,N-Diisopropylethylamine (12.35 mL, 72 mmoles). Pentafluorophenyl trifluoroacetate (8.9 mL, 52 mmoles) was added dropwise, under argon, and the reaction was allowed to stir at room temperature for 30 minutes. Boc-diamine 91a or 91b (68.87 mmol) was added, along with N,N-Diisopropylethylamine (12.35 mL, 72 mmoles), and the reaction was allowed to stir at room temperature for 16 hours. At that time, the DMF was reduced by >75% under reduced pressure, and then the mixture was dissolved in dichloromethane. The organic layer was washed with sodium bicarbonate, water and brine. The organic layer was then separated and dried over sodium sulfate, filtered and reduced to an oil under reduced pressure. The resultant oil was purified by silica gel chromatography (2%->10% methanol/dichloromethane) to give compounds 92a and 92b in an approximate 80% yield. LCMS and proton NMR were consistent with the structure.

[0850] Compound 92a or 92b (6.7 mmoles) was treated with 20 mL of dichloromethane and 20 mL of trifluoroacetic acid at room temperature for 16 hours. The resultant solution was evaporated and then dissolved in methanol and treated with DOWEX-OH resin for 30 minutes. The resultant solution was filtered and reduced to an oil under reduced pressure to give 85-90% yield of compounds 93a and 93b.

[0851] Compounds 7 or 64 (9.6 mmoles) were treated with HBTU (3.7 g, 9.6 mmoles) and N,N-Diisopropylethylamine (5 mL) in DMF (20 mL) for 15 minutes. To this was added either compounds 93a or 93b (3 mmoles), and allowed to stir at room temperature for 16 hours. At that time, the DMF was reduced by >75% under reduced pressure, and then the mixture was dissolved in dichloromethane. The organic layer was washed with sodium bicarbonate, water and brine. The organic layer was then separated and dried over sodium sulfate, filtered and reduced to an oil under reduced pressure. The resultant oil was purified by silica gel chromatography (5%->20% methanol/dichloromethane) to give compounds 96a-d in 20-40% yield. LCMS and proton NMR was consistent with the structure.

[0852] Compounds 96a-d (0.75 mmoles), individually, were hydrogenated over Raney Nickel for 3 hours in Ethanol (75 mL). At that time, the catalyst was removed by filtration thru celite, and the ethanol removed under reduced pressure to give compounds 97a-d in 80-90% yield. LCMS and proton NMR were consistent with the structure.

[0853] Compound 23 (0.32 g, 0.53 mmoles) was treated with HBTU (0.2 g, 0.53 mmoles) and N,N-Diisopropylethylamine (0.19 mL, 1.14 mmoles) in DMF (30 mL) for 15 minutes. To this was added compounds 97a-d (0.38 mmoles), individually, and allowed to stir at room temperature for 16 hours. At that time, the DMF was reduced by >75% under reduced pressure, and then the mixture was dissolved in dichloromethane. The organic layer was washed with sodium bicarbonate, water and brine. The organic layer was then separated and dried over sodium sulfate, filtered and reduced to an oil under reduced pressure. The resultant oil was purified by silica gel chromatography (2%->20% methanol/dichloromethane) to give compounds 98a-d in 30-40% yield. LCMS and proton NMR was consistent with the structure.

[0854] Compound 99 (0.17 g, 0.76 mmoles) was treated with HBTU (0.29 g, 0.76 mmoles) and N,N-Diisopropylethylamine (0.35 mL, 2.0 mmoles) in DMF (50 mL) for 15 minutes. To this was added compounds 97a-d (0.51 mmoles), individually, and allowed to stir at room temperature for 16 hours. At that time, the DMF was reduced by >75% under reduced pressure, and then the mixture was dissolved in dichloromethane. The organic layer was washed with sodium bicarbonate, water and brine. The organic layer was then separated and dried over sodium sulfate, filtered and reduced to an oil under reduced pressure. The resultant oil was purified by silica gel chromatography (5%->20% methanol/dichloromethane) to give compounds 100a-d in 40-60% yield. LCMS and proton NMR was consistent with the structure.

[0855] Compounds 100a-d (0.16 mmoles), individually, were hydrogenated over 10% Pd(OH)₂/C for 3 hours in methanol/ethyl acetate (1:1, 50 mL). At that time, the catalyst was removed by filtration thru celite, and the organics removed under reduced pressure to give compounds 101a-d in 80-90% yield. LCMS and proton NMR was consistent with the structure.

[0856] Compounds 101a-d (0.15 mmoles), individually, were dissolved in DMF (15 mL) and pyridine (0.016 mL, 0.2 mmoles). Pentafluorophenyl trifluoroacetate (0.034 mL, 0.2 mmoles) was added dropwise, under argon, and the reaction was allowed to stir at room temperature for 30 minutes. At that time, the DMF was reduced by >75% under reduced pressure, and then the mixture was dissolved in dichloromethane. The organic layer was washed with sodium bicarbonate, water and brine. The organic layer was then separated and dried over sodium sulfate, filtered and reduced to an oil under reduced pressure. The resultant oil was purified by silica gel chromatography (2%->50% methanol/dichloromethane) to give compounds 102a-d in an approximate 80% yield. LCMS and proton NMR were consistent with the structure.

[chemical structure]

[0857] Oligomeric Compound 102, comprising a GalNAc₃-8 conjugate group, was prepared using the general procedures illustrated in Example 46. The GalNAc₃ cluster portion of the conjugate group GalNAc₃-8 (GalNAc₃-8ₐ) can be combined with any cleavable moiety to provide a variety of conjugate groups. In a preferred embodiment, the cleavable moiety is —P(═O)(OH)-A_{d}-P(═O)(OH)—.

[0858] The structure of GalNAc₃-8 (GalNAc₃-8ₐ-CM-) is shown below:

[chemical structure]

### Example 48: Preparation of Oligonucleotide 119 Comprising GalNAc₃-7

[chemical structure]

[chemical structure]

[0859] Compound 112 was synthesized following the procedure described in the literature (J. Med. Chem. 2004, 47, 5798-5808).

[0860] Compound 112 (5 g, 8.6 mmol) was dissolved in 1:1 methanol/ethyl acetate (22 mL/22 mL). Palladium hydroxide on carbon (0.5 g) was added. The reaction mixture was stirred at room temperature under hydrogen for 12 h. The reaction mixture was filtered through a pad of celite and washed the pad with 1:1 methanol/ethyl acetate. The filtrate and the washings were combined and concentrated to dryness to yield Compound 105a (quantitative). The structure was confirmed by LCMS.

[0861] Compound 113 (1.25 g, 2.7 mmol), HBTU (3.2 g, 8.4 mmol) and DIEA (2.8 mL, 16.2 mmol) were dissolved in anhydrous DMF (17 mL) and the reaction mixture was stirred at room temperature for 5 min. To this a solution of Compound 105a (3.77 g, 8.4 mmol) in anhydrous DMF (20 mL) was added. The reaction was stirred at room temperature for 6 h. Solvent was removed under reduced pressure to get an oil. The residue was dissolved in CH₂Cl₂ (100 mL) and washed with aqueous saturated NaHCO₃ solution (100 mL) and brine (100 mL). The organic phase was separated, dried (Na₂SO₄), filtered and evaporated. The residue was purified by silica gel column chromatography and eluted with 10 to 20% MeOH in dichloromethane to yield Compound 114 (1.45 g, 30%). The structure was confirmed by LCMS and ¹H NMR analysis.

[0862] Compound 114 (1.43 g, 0.8 mmol) was dissolved in 1:1 methanol/ethyl acetate (4 mL/4 mL). Palladium on carbon (wet, 0.14 g) was added. The reaction mixture was flushed with hydrogen and stirred at room temperature under hydrogen for 12 h. The reaction mixture was filtered through a pad of celite. The celite pad was washed with methanol/ethyl acetate (1:1). The filtrate and the washings were combined together and evaporated under reduced pressure to yield Compound 115 (quantitative). The structure was confirmed by LCMS and ¹H NMR analysis.

[0863] Compound 83a (0.17 g, 0.75 mmol), HBTU (0.31 g, 0.83 mmol) and DIEA (0.26 mL, 1.5 mmol) were dissolved in anhydrous DMF (5 mL) and the reaction mixture was stirred at room temperature for 5 min. To this a solution of Compound 115 (1.22 g, 0.75 mmol) in anhydrous DMF was added and the reaction was stirred at room temperature for 6 h. The solvent was removed under reduced pressure and the residue was dissolved in CH₂Cl₂. The organic layer was washed aqueous saturated NaHCO₃ solution and brine and dried over anhydrous Na₂SO₄ and filtered. The organic layer was concentrated to dryness and the residue obtained was purified by silica gel column chromatography and eluted with 3 to 15% MeOH in dichloromethane to yield Compound 116 (0.84 g, 61%). The structure was confirmed by LC MS and ¹H NMR analysis.

[chemical structure]

[0864] Compound 116 (0.74 g, 0.4 mmol) was dissolved in 1:1 methanol/ethyl acetate (5 mL/5 mL). Palladium on carbon (wet, 0.074 g) was added. The reaction mixture was flushed with hydrogen and stirred at room temperature under hydrogen for 12 h. The reaction mixture was filtered through a pad of celite. The celite pad was washed with methanol/ethyl acetate (1:1). The filtrate and the washings were combined together and evaporated under reduced pressure to yield compound 117 (0.73 g, 98%). The structure was confirmed by LCMS and ¹H NMR analysis.

[0865] Compound 117 (0.63 g, 0.36 mmol) was dissolved in anhydrous DMF (3 mL). To this solution N,N-Diisopropylethylamine (70 μL, 0.4 mmol) and pentafluorophenyl trifluoroacetate (72 μL, 0.42 mmol) were added. The reaction mixture was stirred at room temperature for 12 h and poured into a aqueous saturated NaHCO₃ solution. The mixture was extracted with dichloromethane, washed with brine and dried over anhydrous Na₂SO₄. The dichloromethane solution was concentrated to dryness and purified with silica gel column chromatography and eluted with 5 to 10% MeOH in dichloromethane to yield compound 118 (0.51 g, 79%). The structure was confirmed by LCMS and ³H and ¹H and ¹⁹F NMR.

[chemical structure]

[0866] Oligomeric Compound 119, comprising a GalNAc₃-7 conjugate group, was prepared using the general procedures illustrated in Example 46. The GalNAc₃ cluster portion of the conjugate group GalNAc₃-7 (GalNAc₃-7ₐ) can be combined with any cleavable moiety to provide a variety of conjugate groups. In certain embodiments, the cleavable moiety is —P(═O)(OH)-A_{d}-P(═O)(OH)—.

[0867] The structure of GalNAc₃-7 (GalNAc₃-7ₐ-CM-) is shown below:

[chemical structure]

### Example 49: Preparation of Oligonucleotide 132 Comprising GalNAc₃-5

[chemical structure]

[0868] Compound 120 (14.01 g, 40 mmol) and HBTU (14.06 g, 37 mmol) were dissolved in anhydrous DMF (80 mL). Triethylamine (11.2 mL, 80.35 mmol) was added and stirred for 5 min. The reaction mixture was cooled in an ice bath and a solution of compound 121 (10 g, mmol) in anhydrous DMF (20 mL) was added. Additional triethylamine (4.5 mL, 32.28 mmol) was added and the reaction mixture was stirred for 18 h under an argon atmosphere. The reaction was monitored by TLC (ethyl acetate:hexane; 1:1; Rf=0.47). The solvent was removed under reduced pressure. The residue was taken up in EtOAc (300 mL) and washed with 1M NaHSO₄ (3×150 mL), aqueous saturated NaHCO₃ solution (3×150 mL) and brine (2×100 mL). Organic layer was dried with Na₂SO₄. Drying agent was removed by filtration and organic layer was concentrated by rotary evaporation. Crude mixture was purified by silica gel column chromatography and eluted by using 35-50% EtOAc in hexane to yield a compound 122 (15.50 g, 78.13%). The structure was confirmed by LCMS and ¹H NMR analysis. Mass m/z 589.3 [M+H]⁺.

[0869] A solution of LiOH (92.15 mmol) in water (20 mL) and THF (10 mL) was added to a cooled solution of Compound 122 (7.75 g, 13.16 mmol) dissolved in methanol (15 mL). The reaction mixture was stirred at room temperature for 45 min. and monitored by TLC (EtOAc:hexane; 1:1). The reaction mixture was concentrated to half the volume under reduced pressure. The remaining solution was cooled an ice bath and neutralized by adding concentrated HCl. The reaction mixture was diluted, extracted with EtOAc (120 mL) and washed with brine (100 mL). An emulsion formed and cleared upon standing overnight. The organic layer was separated dried (Na₂SO₄), filtered and evaporated to yield Compound 123 (8.42 g). Residual salt is the likely cause of excess mass. LCMS is consistent with structure. Product was used without any further purification. M.W.cal:574.36; M.W.fd:575.3 [M+H]⁺.

[chemical structure]

[0870] Compound 126 was synthesized following the procedure described in the literature (J. Am. Chem. Soc. 2011, 133, 958-963).

[chemical structure]

[chemical structure]

[0871] Compound 123 (7.419 g, 12.91 mmol), HOBt (3.49 g, 25.82 mmol) and compound 126 (6.33 g, 16.14 mmol) were dissolved in and DMF (40 mL) and the resulting reaction mixture was cooled in an ice bath. To this N,N-Diisopropylethylamine (4.42 mL, 25.82 mmol), PyBop (8.7 g, 16.7 mmol) followed by Bop coupling reagent (1.17 g, 2.66 mmol) were added under an argon atmosphere. The ice bath was removed and the solution was allowed to warm to room temperature. The reaction was completed after 1 h as determined by TLC (DCM:MeOH:AA; 89:10:1). The reaction mixture was concentrated under reduced pressure. The residue was dissolved in EtOAc (200 mL) and washed with 1 M NaHSO₄ (3×100 mL), aqueous saturated NaHCO₃ (3×100 mL) and brine (2×100 mL). The organic phase separated dried (Na₂SO₄), filtered and concentrated. The residue was purified by silica gel column chromatography with a gradient of 50% hexanes/EtOAC to 100% EtOAc to yield Compound 127 (9.4 g) as a white foam. LCMS and ¹H NMR were consistent with structure. Mass m/z 778.4 [M+H]⁺.

[0872] Trifluoroacetic acid (12 mL) was added to a solution of compound 127 (1.57 g, 2.02 mmol) in dichloromethane (12 mL) and stirred at room temperature for 1 h. The reaction mixture was co-evaporated with toluene (30 mL) under reduced pressure to dryness. The residue obtained was co-evaporated twice with acetonitrile (30 mL) and toluene (40 mL) to yield Compound 128 (1.67 g) as trifluoro acetate salt and used for next step without further purification. LCMS and ¹H NMR were consistent with structure. Mass m/z 478.2 [M+H]⁺.

[0873] Compound 7 (0.43 g, 0.963 mmol), HATU (0.35 g, 0.91 mmol), and HOAt (0.035 g, 0.26 mmol) were combined together and dried for 4 h over P₂O₅ under reduced pressure in a round bottom flask and then dissolved in anhydrous DMF (1 mL) and stirred for 5 min. To this a solution of compound 128 (0.20 g, 0.26 mmol) in anhydrous DMF (0.2 mL) and N,N-Diisopropylethylamine (0.2 mL) was added. The reaction mixture was stirred at room temperature under an argon atmosphere. The reaction was complete after 30 min as determined by LCMS and TLC (7% MeOH/DCM). The reaction mixture was concentrated under reduced pressure. The residue was dissolved in DCM (30 mL) and washed with 1 M NaHSO₄ (3×20 mL), aqueous saturated NaHCO₃ (3×20 mL) and brine (3×20 mL). The organic phase was separated, dried over Na₂SO₄, filtered and concentrated. The residue was purified by silica gel column chromatography using 5-15% MeOH in dichloromethane to yield Compound 129 (96.6 mg). LC MS and ¹H NMR are consistent with structure. Mass m/z 883.4 [M+2H]⁺.

[0874] Compound 129 (0.09 g, 0.051 mmol) was dissolved in methanol (5 mL) in 20 mL scintillation vial. To this was added a small amount of 10% Pd/C (0.015 mg) and the reaction vessel was flushed with H₂ gas. The reaction mixture was stirred at room temperature under H₂ atmosphere for 18 h. The reaction mixture was filtered through a pad of Celite and the Celite pad was washed with methanol. The filtrate washings were pooled together and concentrated under reduced pressure to yield Compound 130 (0.08 g). LCMS and ¹H NMR were consistent with structure. The product was used without further purification. Mass m/z 838.3 [M+2H]⁺.

[0875] To a 10 mL pointed round bottom flask were added compound 130 (75.8 mg, 0.046 mmol), 0.37 M pyridine/DMF (200 μL) and a stir bar. To this solution was added 0.7 M pentafluorophenyl trifluoroacetate/DMF (100 μL) drop wise with stirring. The reaction was completed after 1 h as determined by LC MS. The solvent was removed under reduced pressure and the residue was dissolved in CHCl₃ (˜10 mL). The organic layer was partitioned against NaHSO₄ (1 M, 10 mL), aqueous saturated NaHCO₃ (10 mL) and brine (10 mL) three times each. The organic phase separated and dried over Na₂SO₄, filtered and concentrated to yield Compound 131 (77.7 mg). LCMS is consistent with structure. Used without further purification. Mass m/z 921.3 [M+2H]⁺.

[chemical structure]

[0876] Oligomeric Compound 132, comprising a GalNAc₃-5 conjugate group, was prepared using the general procedures illustrated in Example 46. The GalNAc₃ cluster portion of the conjugate group GalNAc₃-5 (GalNAc₃-5ₐ) can be combined with any cleavable moiety to provide a variety of conjugate groups. In certain embodiments, the cleavable moiety is —P(═O)(OH)-A_{d}-P(═O)(OH)—. The structure of GalNAc₃-5 (GalNAc₃-5ₐ-CM-) is shown below:

[chemical structure]

### Example 50: Preparation of Oligonucleotide 144 Comprising GalNAc₄-11

[chemical structure]

[chemical structure]

[0877] Synthesis of Compound 134. To a Merrifield flask was added aminomethyl VIMAD resin (2.5 g, 450 μmol/g) that was washed with acetonitrile, dimethylformamide, dichloromethane and acetonitrile. The resin was swelled in acetonitrile (4 mL). Compound 133 was pre-activated in a 100 mL round bottom flask by adding 20 (1.0 mmol, 0.747 g), TBTU (1.0 mmol, 0.321 g), acetonitrile (5 mL) and DIEA (3.0 mmol, 0.5 mL). This solution was allowed to stir for 5 min and was then added to the Merrifield flask with shaking. The suspension was allowed to shake for 3 h. The reaction mixture was drained and the resin was washed with acetonitrile, DMF and DCM. New resin loading was quantitated by measuring the absorbance of the DMT cation at 500 nm (extinction coefficient=76000) in DCM and determined to be 238 μmol/g. The resin was capped by suspending in an acetic anhydride solution for ten minutes three times.

[0878] The solid support bound compound 141 was synthesized using iterative Fmoc-based solid phase peptide synthesis methods. A small amount of solid support was withdrawn and suspended in aqueous ammonia (28-30 wt %) for 6 h. The cleaved compound was analyzed by LC-MS and the observed mass was consistent with structure. Mass m/z 1063.8 [M+2H]⁺.

[0879] The solid support bound compound 142 was synthesized using solid phase peptide synthesis methods.

[chemical structure]

[0880] The solid support bound compound 143 was synthesized using standard solid phase synthesis on a DNA synthesizer.

[0881] The solid support bound compound 143 was suspended in aqueous ammonia (28-30 wt %) and heated at 55° C. for 16 h. The solution was cooled and the solid support was filtered. The filtrate was concentrated and the residue dissolved in water and purified by HPLC on a strong anion exchange column. The fractions containing full length compound 144 were pooled together and desalted. The resulting GalNAc₄-11 conjugated oligomeric compound was analyzed by LC-MS and the observed mass was consistent with structure.

[0882] The GalNAc₄ cluster portion of the conjugate group GalNAc₄-11 (GalNAc₄-11ₐ) can be combined with any cleavable moiety to provide a variety of conjugate groups. In certain embodiments, the cleavable moiety is —P(═O)(OH)-A_{d}-P(═O)(OH)—.

[0883] The structure of GalNAc₄-11 (GalNAc₄-11ₐ-CM) is shown below:

[chemical structure]

### Example 51: Preparation of Oligonucleotide 155 Comprising GalNAc₃-6

[chemical structure]

[0884] Compound 146 was synthesized as described in the literature (Analytical Biochemistry 1995, 229, 54-60).

[chemical structure]

[0885] Compound 4 (15 g, 45.55 mmol) and compound 35b (14.3 grams, 57 mmol) were dissolved in CH₂Cl₂ (200 ml). Activated molecular sieves (4 Å. 2 g, powdered) were added, and the reaction was allowed to stir for 30 minutes under nitrogen atmosphere. TMS-OTf was added (4.1 ml, 22.77 mmol) and the reaction was allowed to stir at room temp overnight. Upon completion, the reaction was quenched by pouring into solution of saturated aqueous NaHCO₃ (500 ml) and crushed ice (˜150 g). The organic layer was separated, washed with brine, dried over MgSO₄, filtered, and was concentrated to an orange oil under reduced pressure. The crude material was purified by silica gel column chromatography and eluted with 2-10% MeOH in CH₂Cl₂ to yield Compound 112 (16.53 g, 63%). LCMS and ¹H NMR were consistent with the expected compound. Compound 112 (4.27 g, 7.35 mmol) was dissolved in 1:1 MeOH/EtOAc (40 ml). The reaction mixture was purged by bubbling a stream of argon through the solution for 15 minutes. Pearlman's catalyst (palladium hydroxide on carbon, 400 mg) was added, and hydrogen gas was bubbled through the solution for 30 minutes. Upon completion (TLC 10% MeOH in CH₂Cl₂, and LCMS), the catalyst was removed by filtration through a pad of celite. The filtrate was concentrated by rotary evaporation, and was dried briefly under high vacuum to yield Compound 105a (3.28 g). LCMS and ¹H NMR were consistent with desired product. Compound 147 (2.31 g, 11 mmol) was dissolved in anhydrous DMF (100 mL). N,N-Diisopropylethylamine (DIEA, 3.9 mL, 22 mmol) was added, followed by HBTU (4 g, 10.5 mmol). The reaction mixture was allowed to stir for ˜ 15 minutes under nitrogen. To this a solution of compound 105a (3.3 g, 7.4 mmol) in dry DMF was added and stirred for 2 h under nitrogen atmosphere. The reaction was diluted with EtOAc and washed with saturated aqueous NaHCO₃ and brine. The organics phase was separated, dried (MgSO₄), filtered, and concentrated to an orange syrup. The crude material was purified by column chromatography 2-5% MeOH in CH₂Cl₂ to yield Compound 148 (3.44 g, 73%). LCMS and ¹H NMR were consistent with the expected product.

[0886] Compound 148 (3.3 g, 5.2 mmol) was dissolved in 1:1 MeOH/EtOAc (75 ml). The reaction mixture was purged by bubbling a stream of argon through the solution for 15 minutes. Pearlman's catalyst (palladium hydroxide on carbon) was added (350 mg). Hydrogen gas was bubbled through the solution for 30 minutes. Upon completion (TLC 10% MeOH in DCM, and LCMS), the catalyst was removed by filtration through a pad of celite. The filtrate was concentrated by rotary evaporation, and was dried briefly under high vacuum to yield Compound 149 (2.6 g). LCMS was consistent with desired product. The residue was dissolved in dry DMF (10 ml) was used immediately in the next step.

[chemical structure]

[0887] Compound 146 (0.68 g, 1.73 mmol) was dissolved in dry DMF (20 ml). To this DIEA (450 μL, 2.6 mmol, 1.5 eq.) and HBTU (1.96 g, 0.5.2 mmol) were added. The reaction mixture was allowed to stir for 15 minutes at room temperature under nitrogen. A solution of compound 149 (2.6 g) in anhydrous DMF (10 mL) was added. The pH of the reaction was adjusted to pH=9-10 by addition of DIEA (if necessary). The reaction was allowed to stir at room temperature under nitrogen for 2 h. Upon completion the reaction was diluted with EtOAc (100 mL), and washed with aqueous saturated aqueous NaHCO₃, followed by brine. The organic phase was separated, dried over MgSO₄, filtered, and concentrated. The residue was purified by silica gel column chromatography and eluted with 2-10% MeOH in CH₂Cl₂ to yield Compound 150 (0.62 g, 20%). LCMS and ¹H NMR were consistent with the desired product.

[0888] Compound 150 (0.62 g) was dissolved in 1:1 MeOH/EtOAc (5 L). The reaction mixture was purged by bubbling a stream of argon through the solution for 15 minutes. Pearlman's catalyst (palladium hydroxide on carbon) was added (60 mg). Hydrogen gas was bubbled through the solution for 30 minutes. Upon completion (TLC 10% MeOH in DCM, and LCMS), the catalyst was removed by filtration (syringe-tip Teflon filter, 0.45 μm). The filtrate was concentrated by rotary evaporation, and was dried briefly under high vacuum to yield Compound 151 (0.57 g). The LCMS was consistent with the desired product. The product was dissolved in 4 mL dry DMF and was used immediately in the next step.

[chemical structure]

[0889] Compound 83a (0.11 g, 0.33 mmol) was dissolved in anhydrous DMF (5 mL) and N,N-Diisopropylethylamine (75 μL, 1 mmol) and PFP-TFA (90 μL, 0.76 mmol) were added. The reaction mixture turned magenta upon contact, and gradually turned orange over the next 30 minutes. Progress of reaction was monitored by TLC and LCMS. Upon completion (formation of the PFP ester), a solution of compound 151 (0.57 g, 0.33 mmol) in DMF was added. The pH of the reaction was adjusted to pH=9-10 by addition of N,N-Diisopropylethylamine (if necessary). The reaction mixture was stirred under nitrogen for −30 min. Upon completion, the majority of the solvent was removed under reduced pressure. The residue was diluted with CH₂Cl₂ and washed with aqueous saturated NaHCO₃, followed by brine. The organic phase separated, dried over MgSO₄, filtered, and concentrated to an orange syrup. The residue was purified by silica gel column chromatography (2-10% MeOH in CH₂Cl₂) to yield Compound 152 (0.35 g, 55%). LCMS and ¹H NMR were consistent with the desired product.

[0890] Compound 152 (0.35 g, 0.182 mmol) was dissolved in 1:1 MeOH/EtOAc (10 mL). The reaction mixture was purged by bubbling a stream of argon thru the solution for 15 minutes. Pearlman's catalyst (palladium hydroxide on carbon) was added (35 mg). Hydrogen gas was bubbled thru the solution for 30 minutes. Upon completion (TLC 10% MeOH in DCM, and LCMS), the catalyst was removed by filtration (syringe-tip Teflon filter, 0.45 μm). The filtrate was concentrated by rotary evaporation, and was dried briefly under high vacuum to yield Compound 153 (0.33 g, quantitative). The LCMS was consistent with desired product.

[0891] Compound 153 (0.33 g, 0.18 mmol) was dissolved in anhydrous DMF (5 mL) with stirring under nitrogen. To this N,N-Diisopropylethylamine (65 μL, 0.37 mmol) and PFP-TFA (35 μL, 0.28 mmol) were added. The reaction mixture was stirred under nitrogen for ˜ 30 min. The reaction mixture turned magenta upon contact, and gradually turned orange. The pH of the reaction mixture was maintained at pH=9-10 by adding more N-Diisopropylethylamine. The progress of the reaction was monitored by TLC and LCMS. Upon completion, the majority of the solvent was removed under reduced pressure. The residue was diluted with CH₂Cl₂ (50 mL), and washed with saturated aqueous NaHCO₃, followed by brine. The organic layer was dried over MgSO₄, filtered, and concentrated to an orange syrup. The residue was purified by column chromatography and eluted with 2-10% MeOH in CH₂Cl₂ to yield Compound 154 (0.29 g, 79%). LCMS and ¹H NMR were consistent with the desired product.

[chemical structure]

[0892] Oligomeric Compound 155, comprising a GalNAc₃-6 conjugate group, was prepared using the general procedures illustrated in Example 46. The GalNAc₃ cluster portion of the conjugate group GalNAc₃-6 (GalNAc₃-6ₐ) can be combined with any cleavable moiety to provide a variety of conjugate groups. In certain embodiments, the cleavable moiety is —P(═O)(OH)-A_{d}-P(═O)(OH)—.

[0893] The structure of GalNAc₃-6 (GalNAc₃-6ₐ-CM-) is shown below:

[chemical structure]

### Example 52: Preparation of Oligonucleotide 160 Comprising GalNAc₃-9

[chemical structure]

[0894] Compound 156 was synthesized following the procedure described in the literature (J. Med. Chem. 2004, 47, 5798-5808).

[0895] Compound 156, (18.60 g, 29.28 mmol) was dissolved in methanol (200 mL). Palladium on carbon (6.15 g, 10 wt %, loading (dry basis), matrix carbon powder, wet) was added. The reaction mixture was stirred at room temperature under hydrogen for 18 h. The reaction mixture was filtered through a pad of celite and the celite pad was washed thoroughly with methanol. The combined filtrate was washed and concentrated to dryness. The residue was purified by silica gel column chromatography and eluted with 5-10% methanol in dichloromethane to yield Compound 157 (14.26 g, 89%). Mass m/z 544.1 [M−H]⁻.

[0896] Compound 157 (5 g, 9.17 mmol) was dissolved in anhydrous DMF (30 mL). HBTU (3.65 g, 9.61 mmol) and N,N-Diisopropylethylamine (13.73 mL, 78.81 mmol) were added and the reaction mixture was stirred at room temperature for 5 minutes. To this a solution of compound 47 (2.96 g, 7.04 mmol) was added. The reaction was stirred at room temperature for 8 h. The reaction mixture was poured into a saturated NaHCO₃ aqueous solution. The mixture was extracted with ethyl acetate and the organic layer was washed with brine and dried (Na₂SO₄), filtered and evaporated. The residue obtained was purified by silica gel column chromatography and eluted with 50% ethyl acetate in hexane to yield compound 158 (8.25 g, 73.3%). The structure was confirmed by MS and ¹H NMR analysis.

[0897] Compound 158 (7.2 g, 7.61 mmol) was dried over P₂O₅ under reduced pressure. The dried compound was dissolved in anhydrous DMF (50 mL). To this 1H-tetrazole (0.43 g, 6.09 mmol) and N-methylimidazole (0.3 mL, 3.81 mmol) and 2-cyanoethyl-N,N,N′,N′-tetraisopropyl phosphorodiamidite (3.65 mL, 11.50 mmol) were added. The reaction mixture was stirred t under an argon atmosphere for 4 h. The reaction mixture was diluted with ethyl acetate (200 mL). The reaction mixture was washed with saturated NaHCO₃ and brine. The organic phase was separated, dried (Na₂SO₄), filtered and evaporated. The residue was purified by silica gel column chromatography and eluted with 50-90% ethyl acetate in hexane to yield Compound 159 (7.82 g, 80.5%). The structure was confirmed by LCMS and ³¹P NMR analysis.

[chemical structure]

[0898] Oligomeric Compound 160, comprising a GalNAc₃-9 conjugate group, was prepared using standard oligonucleotide synthesis procedures. Three units of compound 159 were coupled to the solid support, followed by nucleotide phosphoramidites. Treatment of the protected oligomeric compound with aqueous ammonia yielded compound 160. The GalNAc₃ cluster portion of the conjugate group GalNAc₃-9 (GalNAc₃-9ₐ) can be combined with any cleavable moiety to provide a variety of conjugate groups. In certain embodiments, the cleavable moiety is —P(═O)(OH)-A_{d}-P(═O)(OH)—. The structure of GalNAc₃-9 (GalNAc₃-9ₐ-CM) is shown below:

[chemical structure]

### Example 53: Alternate Procedure for Preparation of Compound 18 (GalNAc₃-1a and GalNAc₃-3a)

[chemical structure]

[0899] Lactone 161 was reacted with diamino propane (3-5 eq) or Mono-Boc protected diamino propane (1 eq) to provide alcohol 162a or 162b. When unprotected propanediamine was used for the above reaction, the excess diamine was removed by evaporation under high vacuum and the free amino group in 162a was protected using CbzCl to provide 162b as a white solid after purification by column chromatography. Alcohol 162b was further reacted with compound 4 in the presence of TMSOTf to provide 163a which was converted to 163b by removal of the Cbz group using catalytic hydrogenation. The pentafluorophenyl (PFP) ester 164 was prepared by reacting triacid 113 (see Example 48) with PFPTFA (3.5 eq) and pyridine (3.5 eq) in DMF (0.1 to 0.5 M). The triester 164 was directly reacted with the amine 163b (3-4 eq) and DIPEA (3-4 eq) to provide Compound 18. The above method greatly facilitates purification of intermediates and minimizes the formation of byproducts which are formed using the procedure described in Example 4.

### Example 54: Alternate Procedure for Preparation of Compound 18 (GalNAc₃-1a and GalNAc₃-3a)

[chemical structure]

[0900] The triPFP ester 164 was prepared from acid 113 using the procedure outlined in example 53 above and reacted with mono-Boc protected diamine to provide 165 in essentially quantitative yield. The Boc groups were removed with hydrochloric acid or trifluoroacetic acid to provide the triamine which was reacted with the PFP activated acid 166 in the presence of a suitable base such as DIPEA to provide Compound 18. The PFP protected Gal-NAc acid 166 was prepared from the corresponding acid by treatment with PFPTFA (1-1.2 eq) and pyridine (1-1.2 eq) in DMF. The precursor acid in turn was prepared from the corresponding alcohol by oxidation using TEMPO (0.2 eq) and BAIB in acetonitrile and water. The precursor alcohol was prepared from sugar intermediate 4 by reaction with 1,6-hexanediol (or 1,5-pentanediol or other diol for other n values) (2-4 eq) and TMSOTf using conditions described previously in example 47.

### Example 55: Dose-Dependent Study of Oligonucleotides Comprising Either a 3′ or 5′-Conjugate Group (Comparison of GalNAc₃-1, 3, 8 and 9) Targeting SRB-1 In Vivo

[0901] The oligonucleotides listed below were tested in a dose-dependent study for antisense inhibition of SRB-1 in mice. Unconjugated ISIS 353382 was included as a standard. Each of the various GalNAc₃ conjugate groups was attached at either the 3′ or 5′ terminus of the respective oligonucleotide by a phosphodiester linked 2′-deoxyadenosine nucleoside (cleavable moiety).

TABLE 39
Modified ASO targeting SRB-1

| | | | | SEQ |
|---|---|---|---|---|
| | Sequence | | Con- | ID |
| ASO | (5′ to 3′) | Motif | jugate | No. |
| ISIS | Gₑₛ^{m}CₑₛTₑₛTₑₛ^{m}Cₑₛ | 5/10/5 | none | 2256 |
| 353382 | A_{ds}G_{ds}T_{ds}^{m}C_{ds}A_{ds} | | | |
| (parent) | T_{ds}G_{ds}A_{ds}^{m}C_{ds}T_{ds} | | | |
| | Tₑₛ^{m}Cₑₛ^{m}CₑₛTₑₛTₑ | | | |
| ISIS | Gₑₛ^{m}CₑₛTₑₛTₑₛ^{m}Cₑₛ | 5/10/5 | GalNAc₃-1 | 2257 |
| 655861 | A_{ds}G_{ds}T_{ds}^{m}C_{ds}A_{ds} | | | |
| | T_{ds}G_{ds}A_{ds}^{m}C_{ds}T_{ds} | | | |
| | Tₑₛ^{m}Cₑₛ^{m}CₑₛTₑₛTₑₒ | | | |
| | A_{do'}-GalNAC₃-1ₐ | | | |
| ISIS | Gₑₛ^{m}CₑₛTₑₛTₑₛ^{m}Cₑₛ | 5/10/5 | GalNAc₃-9 | 2257 |
| 664078 | A_{ds}G_{ds}T_{ds}^{m}C_{ds}A_{ds} | | | |
| | T_{ds}G_{ds}A_{ds}^{m}C_{ds}T_{ds} | | | |
| | Tₑₛ^{m}Cₑₛ^{m}CₑₛTₑₛTₑₒ | | | |
| | A_{do'}-GalNAc₃-9ₐ | | | |
| ISIS | GalNAc₃-3_{a-o'}A_{do} | 5/10/5 | GalNAc₃-3 | 2258 |
| 661161 | Gₑₛ^{m}CₑₛTₑₛTₑₛ^{m}Cₑₛ | | | |
| | A_{ds}G_{ds}T_{ds}^{m}C_{ds}A_{ds}T_{ds} | | | |
| | G_{ds}A_{ds}^{m}C_{ds}T_{ds}Tₑₛ | | | |
| | ^{m}Cₑₛ^{m}CₑₛTₑₛTₑ | | | |
| ISIS | GalNAC₃-8_{a-o'}A_{do} | 5/10/5 | GalNAc₃-8 | 2258 |
| 665001 | Gₑₛ^{m}CₑₛTₑₛTₑₛ^{m}Cₑₛ | | | |
| | A_{ds}G_{ds}T_{ds}^{m}C_{ds}A_{ds}T_{ds} | | | |
| | G_{ds}A_{ds}^{m}C_{ds}T_{ds}Tₑₛ | | | |
| | ^{m}Cₑₛ^{m}CₑₛTₑₛTₑ | | | |

[0902] Capital letters indicate the nucleobase for each nucleoside and mC indicates a 5-methyl cytosine. Subscripts: “e” indicates a 2′-MOE modified nucleoside; “d” indicates a β-D-2′-deoxyribonucleoside; “s” indicates a phosphorothioate internucleoside linkage (PS); “o” indicates a phosphodiester internucleoside linkage (PO); and “o′” indicates —O—P(═O)(OH)—. Conjugate groups are in bold.

[0903] The structure of GalNAc₃-1ₐ was shown previously in Example 9. The structure of GalNAc₃-9 was shown previously in Example 52. The structure of GalNAc₃-3 was shown previously in Example 39. The structure of GalNAc₃-8 was shown previously in Example 47.

### Treatment

[0904] Six week old male Balb/c mice (Jackson Laboratory, Bar Harbor, ME) were injected subcutaneously once at the dosage shown below with ISIS 353382, 655861, 664078, 661161, 665001 or with saline. Each treatment group consisted of 4 animals. The mice were sacrificed 72 hours following the final administration to determine the liver SRB-1 mRNA levels using real-time PCR and RIBOGREEN® RNA quantification reagent (Molecular Probes, Inc. Eugene, OR) according to standard protocols. The results below are presented as the average percent of SRB-1 mRNA levels for each treatment group, normalized to the saline control.

[0905] As illustrated in Table 40, treatment with antisense oligonucleotides lowered SRB-1 mRNA levels in a dose-dependent manner. Indeed, the antisense oligonucleotides comprising the phosphodiester linked GalNAc₃-1 and GalNAc₃-9 Conjugates at the 3′ terminus (ISIS 655861 and ISIS 664078) and the GalNAc₃-3 and GalNAc₃-8 Conjugates linked at the 5′ terminus (ISIS 661161 and ISIS 665001) showed substantial improvement in potency compared to the unconjugated antisense oligonucleotide (ISIS 353382). Furthermore, ISIS 664078, comprising a GalNAc₃-9 conjugate at the 3′ terminus was essentially equipotent compared to ISIS 655861, which comprises a GalNAc₃-1 conjugate at the 3′ terminus. The 5′ conjugated antisense oligonucleotides, ISIS 661161 and ISIS 665001, comprising a GalNAc₃-3 or GalNAc₃-9, respectively, had increased potency compared to the 3′ conjugated antisense oligonucleotides (ISIS 655861 and ISIS 664078).

TABLE 40
ASOs containing GalNAc₃-1, 3, 8 or 9 targeting SRB-1

| | Dosage | SRB-1 mRNA | |
|---|---|---|---|
| ISIS No. | (mg/kg) | (% Saline) | Conjugate |
| Saline | n/a | 100 | |
| 353382 | 3 | 88 | none |
| | 10 | 68 | |
| | 30 | 36 | |
| 655861 | 0.5 | 98 | GalNac₃-1 (3′) |
| | 1.5 | 76 | |
| | 5 | 31 | |
| | 15 | 20 | |
| 664078 | 0.5 | 88 | GalNac₃-9 (3′) |
| | 1.5 | 85 | |
| | 5 | 46 | |
| | 15 | 20 | |
| 661161 | 0.5 | 92 | GalNac₃-3 (5′) |
| | 1.5 | 59 | |
| | 5 | 19 | |
| | 15 | 11 | |
| 665001 | 0.5 | 100 | GalNac₃-8 (5′) |
| | 1.5 | 73 | |
| | 5 | 29 | |
| | 15 | 13 | |

[0906] Liver transaminase levels, alanine aminotransferase (ALT) and aspartate aminotransferase (AST), in serum were measured relative to saline injected mice using standard protocols. Total bilirubin and BUN were also evaluated. The change in body weights was evaluated with no significant change from the saline group. ALTs, ASTs, total bilirubin and BUN values are shown in the table below.

TABLE 41

| | Dosage | | | | Total | | |
|---|---|---|---|---|---|---|---|
| ISIS No. | mg/kg | | ALT | AST | Bilirubin | BUN | Conjugate |
| Saline | | | 24 | 59 | 0.1 | 37.52 | |
| 353382 | 3 | | 21 | 66 | 0.2 | 34.65 | none |
| | 10 | | 22 | 54 | 0.2 | 34.2 | |
| | 30 | | 22 | 49 | 0.2 | 33.72 | |
| 655861 | 0.5 | | 25 | 62 | 0.2 | 30.65 | GalNac₃-1 (3′) |
| | 1.5 | | 23 | 48 | 0.2 | 30.97 | |
| | 5 | | 28 | 49 | 0.1 | 32.92 | |
| | 15 | | 40 | 97 | 0.1 | 31.62 | |
| 664078 | 0.5 | | 40 | 74 | 0.1 | 35.3 | GalNac₃-9 (3′) |
| | 1.5 | | 47 | 104 | 0.1 | 32.75 | |
| | 5 | | 20 | 43 | 0.1 | 30.62 | |
| | 15 | | 38 | 92 | 0.1 | 26.2 | |
| 661161 | 0.5 | | 101 | 162 | 0.1 | 34.17 | GalNac₃-3 (5′) |
| | 1.5 | g | 42 | 100 | 0.1 | 33.37 | |
| | 5 | g | 23 | 99 | 0.1 | 34.97 | |

| | | | | | | |
|---|---|---|---|---|---|---|
| | 15 | 53 | 83 | 0.1 | 34.8 | |
| 665001 | 0.5 | 28 | 54 | 0.1 | 31.32 | GalNac₃-8 (5′) |
| | 1.5 | 42 | 75 | 0.1 | 32.32 | |
| | 5 | 24 | 42 | 0.1 | 31.85 | |
| | 15 | 32 | 67 | 0.1 | 31. | |

### Example 56: Dose-Dependent Study of Oligonucleotides Comprising Either a 3′ or 5′-Conjugate Group (Comparison of GalNAc₃-1, 2, 3, 5, 6, 7 and 10) Targeting SRB-1 In Vivo

[0907] The oligonucleotides listed below were tested in a dose-dependent study for antisense inhibition of SRB-1 in mice. Unconjugated ISIS 353382 was included as a standard. Each of the various GalNAc₃ Conjugate groups was attached at the 5′ terminus of the respective oligonucleotide by a phosphodiester linked 2′-deoxyadenosine nucleoside (cleavable moiety) except for ISIS 655861 which had the GalNAc₃ Conjugate group attached at the 3′ terminus.

TABLE 42
Modified ASO targeting SRB-1

| | | | | SEQ |
|---|---|---|---|---|
| ASO | Sequence (5′ to 3′) | Motif | Conjugate | ID No. |
| ISIS | Gₑₛ^{m}CₑₛTₑₛTₑₛ^{m}CₑₛA_{ds}G_{ds}T_{ds} | 5/10/5 | no | 2256 |
| 353382 | ^{m}C_{ds}A_{ds}T_{ds}G_{ds}A_{ds}^{m}C_{ds}T_{ds}Tₑₛ | | conjugate | |
| (parent) | ^{m}Cₑₛ^{m}CₑₛTₑₛTₑ | | | |
| ISIS | Gₑₛ^{m}CₑₛTₑₛTₑₛ^{m}CₑₛA_{ds}G_{ds}T_{ds} | 5/10/5 | GalNAc₃-1 | 2257 |
| 655861 | ^{m}C_{ds}A_{ds}T_{ds}G_{ds}A_{ds}^{m}C_{ds}T_{ds}Tₑₛ | | | |
| | ^{m}Cₑₛ^{m}CₑₛTₑₛTₑₒA_{do'}- | | | |
| | GalNAC₃-1ₐ | | | |
| ISIS | GalNAC₃-2_{a-o'}A_{do}Gₑₛ^{m}Cₑₛ | 5/10/5 | GalNAc₃-2 | 2258 |
| 664507 | TₑₛTₑₛ^{m}CₑₛA_{ds}G_{ds}T_{ds}^{m}C_{ds}A_{ds} | | | |
| | T_{ds}G_{ds}A_{ds}^{m}C_{ds}T_{ds}Tₑₛ^{m}Cₑₛ | | | |
| | ^{m}CₑₛTₑₛTₑ | | | |
| ISIS | GalNAc₃-3_{a-o'}A_{do}Gₑₛ^{m}Cₑₛ | 5/10/5 | GalNAc₃-3 | 2258 |
| 661161 | TₑₛTₑₛ^{m}CₑₛA_{ds}G_{ds}T_{ds}^{m}C_{ds}A_{ds} | | | |
| | T_{ds}G_{ds}A_{ds}^{m}C_{ds}T_{ds}Tₑₛ^{m}Cₑₛ | | | |
| | ^{m}CₑₛTₑₛTₑ | | | |
| ISIS | GalNAc₃-5_{a-o'}A_{do}Gₑₛ^{m}Cₑₛ | 5/10/5 | GalNAc₃-5 | 2258 |
| 666224 | TₑₛTₑₛ^{m}CₑₛA_{ds}G_{ds}T_{ds}^{m}C_{ds}A_{ds} | | | |
| | T_{ds}G_{ds}A_{ds}^{m}C_{ds}T_{ds}Tₑₛ^{m}Cₑₛ | | | |
| | ^{m}CₑₛTₑₛTₑ | | | |
| ISIS | GalNAc₃-6_{a-o'}A_{do}Gₑₛ^{m}Cₑₛ | 5/10/5 | GalNAc₃-6 | 2258 |
| 666961 | TₑₛTₑₛ^{m}CₑₛA_{ds}G_{ds}T_{ds}^{m}C_{ds}A_{ds} | | | |
| | T_{ds}G_{ds}A_{ds}^{m}C_{ds}T_{ds}Tₑₛ^{m}Cₑₛ | | | |
| | ^{m}CₑₛTₑₛTₑ | | | |
| ISIS | GalNAc₃-7_{a-o'}A_{do}Gₑₛ^{m}Cₑₛ | 5/10/5 | GalNAc₃-7 | 2258 |
| 666981 | TₑₛTₑₛ^{m}CₑₛA_{ds}G_{ds}T_{ds}^{m}C_{ds}A_{ds} | | | |
| | T_{ds}G_{ds}A_{ds}^{m}C_{ds}T_{ds}Tₑₛ^{m}Cₑₛ | | | |
| | ^{m}CₑₛTₑₛTₑ | | | |
| ISIS | GalNAc₃-10_{a-o'}A_{do}Gₑₛ | 5/10/5 | GalNAc₃-10 | 2258 |
| 666881 | ^{m}CₑₛTₑₛTₑₛ^{m}CₑₛA_{ds}G_{ds}T_{ds} | | | |
| | ^{m}C_{ds}A_{ds}T_{ds}G_{ds}A_{ds}^{m}C_{ds}T_{ds} | | | |
| | Tₑₛ^{m}Cₑₛ^{m}CₑₛTₑₛTₑ | | | |

[0908] Capital letters indicate the nucleobase for each nucleoside and mC indicates a 5-methyl cytosine. Subscripts: “e” indicates a 2′-MOE modified nucleoside; “d” indicates a β-D-2′-deoxyribonucleoside; “s” indicates a phosphorothioate internucleoside linkage (PS); “o” indicates a phosphodiester internucleoside linkage (PO); and “o′” indicates —O—P(═O)(OH)—. Conjugate groups are in bold.

[0909] The structure of GalNAc₃-1ₐ was shown previously in Example 9. The structure of GalNAc₃-2ₐ was shown previously in Example 37. The structure of GalNAc₃-3ₐ was shown previously in Example 39. The structure of GalNAc₃-5ₐ was shown previously in Example 49. The structure of GalNAc₃-6ₐ was shown previously in Example 51. The structure of GalNAc₃-7ₐ was shown previously in Example 48. The structure of GalNAc₃-10ₐ was shown previously in Example 46.

### Treatment

[0910] Six week old male Balb/c mice (Jackson Laboratory, Bar Harbor, ME) were injected subcutaneously once at the dosage shown below with ISIS 353382, 655861, 664507, 661161, 666224, 666961, 666981, 666881 or with saline. Each treatment group consisted of 4 animals. The mice were sacrificed 72 hours following the final administration to determine the liver SRB-1 mRNA levels using real-time PCR and RIBOGREEN® RNA quantification reagent (Molecular Probes, Inc. Eugene, OR) according to standard protocols. The results below are presented as the average percent of SRB-1 mRNA levels for each treatment group, normalized to the saline control.

[0911] As illustrated in Table 43, treatment with antisense oligonucleotides lowered SRB-1 mRNA levels in a dose-dependent manner. Indeed, the conjugated antisense oligonucleotides showed substantial improvement in potency compared to the unconjugated antisense oligonucleotide (ISIS 353382). The 5′ conjugated antisense oligonucleotides showed a slight increase in potency compared to the 3′ conjugated antisense oligonucleotide.

TABLE 43

| | Dosage | SRB-1 mRNA | |
|---|---|---|---|
| ISIS No. | (mg/kg) | (% Saline) | Conjugate |
| Saline | n/a | 100.0 | |
| 353382 | 3 | 96.0 | none |
| | 10 | 73.1 | |
| | 30 | 36.1 | |
| 655861 | 0.5 | 99.4 | GalNac₃-1 (3′) |
| | 1.5 | 81.2 | |
| | 5 | 33.9 | |
| | 15 | 15.2 | |
| 664507 | 0.5 | 102.0 | GalNac₃-2 (5′) |
| | 1.5 | 73.2 | |
| | 5 | 31.3 | |
| | 15 | 10.8 | |
| 661161 | 0.5 | 90.7 | GalNac₃-3 (5′) |
| | 1.5 | 67.6 | |
| | 5 | 24.3 | |
| | 15 | 11.5 | |
| 666224 | 0.5 | 96.1 | GalNac₃-5 (5′) |
| | 1.5 | 61.6 | |
| | 5 | 25.6 | |
| | 15 | 11.7 | |
| | 0.5 | 85.5 | |
| 666961 | 1.5 | 56.3 | GalNAc₃-6 (5′) |
| | 5 | 34.2 | |
| | 15 | 13.1 | |
| 666981 | 0.5 | 84.7 | GalNAc₃-7 (5′) |
| | 1.5 | 59.9 | |
| | 5 | 24.9 | |
| | 15 | 8.5 | |
| 666881 | 0.5 | 100.0 | GalNAc₃-10 (5′) |
| | 1.5 | 65.8 | |
| | 5 | 26.0 | |
| | 15 | 13.0 | |

[0912] Liver transaminase levels, alanine amninotransferase (ALT) and aspartate aminotransferase (AST), in serum were measured relative to saline injected mice using standard protocols. Total bilirubin and BUN were also evaluated. The change in body weights was evaluated with no significant change from the saline group. ALTs, ASTs, total bilirubin and BUN values are shown in Table 44 below.

TABLE 44

| | Dosage | | | | Total | | |
|---|---|---|---|---|---|---|---|
| ISIS No. | mg/kg | | ALT | AST | Bilirubin | BUN | Conjugate |
| Saline | | | 26 | 57 | 0.2 | 27 | |
| 353382 | 3 | | 25 | 92 | 0.2 | 27 | none |
| | 10 | | 23 | 40 | 0.2 | 25 | |
| | 30 | | 29 | 54 | 0.1 | 28 | |
| 655861 | 0.5 | | 25 | 71 | 0.2 | 34 | GalNac₃-1 (3′) |
| | 1.5 | | 28 | 60 | 0.2 | 26 | |
| | 5 | | 26 | 63 | 0.2 | 28 | |
| | 15 | | 25 | 61 | 0.2 | 28 | |
| 664507 | 0.5 | | 25 | 62 | 0.2 | 25 | GalNac₃-2 (5′) |
| | 1.5 | | 24 | 49 | 0.2 | 26 | |
| | 5 | | 21 | 50 | 0.2 | 26 | |
| | 15 | | 59 | 84 | 0.1 | 22 | |
| 661161 | 0.5 | | 20 | 42 | 0.2 | 29 | GalNac₃-3 (5′) |
| | 1.5 | g | 37 | 74 | 0.2 | 25 | |
| | 5 | g | 28 | 61 | 0.2 | 29 | |

| | | | | | | |
|---|---|---|---|---|---|---|
| | 15 | 21 | 41 | 0.2 | 25 | |
| 666224 | 0.5 | 34 | 48 | 0.2 | 21 | GalNac₃-5 (5′) |
| | 1.5 | 23 | 46 | 0.2 | 26 | |
| | 5 | 24 | 47 | 0.2 | 23 | |
| | 15 | 32 | 49 | 0.1 | 26 | |
| 666961 | 0.5 | 17 | 63 | 0.2 | 26 | GalNAc₃-6 (5′) |
| | 1.5 | 23 | 68 | 0.2 | 26 | |
| | 5 | 25 | 66 | 0.2 | 26 | |
| | 15 | 29 | 107 | 0.2 | 28 | |
| 666981 | 0.5 | 24 | 48 | 0.2 | 26 | GalNAc₃-7 (5′) |
| | 1.5 | 30 | 55 | 0.2 | 24 | |
| | 5 | 46 | 74 | 0.1 | 24 | |
| | 15 | 29 | 58 | 0.1 | 26 | |
| 666881 | 0.5 | 20 | 65 | 0.2 | 27 | GalNAc₃-10 |
| | 1.5 | 23 | 59 | 0.2 | 24 | (5′) |
| | 5 | 45 | 70 | 0.2 | 26 | |
| | 15 | 21 | 57 | 0.2 | 24 | |

### Example 57: Duration of Action Study of Oligonucleotides Comprising a 3′-Conjugate Group Targeting ApoC III In Vivo

[0913] Mice were injected once with the doses indicated below and monitored over the course of 42 days for ApoC-III and plasma triglycerides (Plasma TG) levels. The study was performed using 3 transgenic mice that express human APOC-III in each group.

TABLE 45
Modified ASO targeting ApoC III

| | | Link- | SEQ ID |
|---|---|---|---|
| ASO | Sequence (5′ to 3′) | ages | No. |
| ISIS | AₑₛGₑₛ^{m}CₑₛTₑₛTₑₛ^{m}C_{ds}T_{ds}T_{ds}G_{ds}T_{ds} | PS | 2248 |
| 304801 | ^{m}C_{ds}^{m}C_{ds}A_{ds}G_{ds}^{m}C_{ds}TₑₛTₑₛTₑₛAₑₛTₑ | | |
| ISIS | AₑₛGₑₛ^{m}CₑₛTₑₛTₑₛ^{m}C_{ds}T_{ds}T_{ds}G_{ds}T_{ds} | PS | 2249 |
| 647535 | ^{m}C_{ds}^{m}C_{ds}A_{ds}G_{ds}^{m}C_{ds}TₑₛTₑₛTₑₛAₑₛTₑₒ | | |
| | A_{do'}-GalNAC₃-1ₐ | | |
| ISIS | AₑₛGₑₒ^{m}CₑₒTₑₒTₑₒ^{m}C_{ds}T_{ds}T_{ds}G_{ds}T_{ds} | PO/PS | 2249 |
| 647536 | ^{m}C_{ds}^{m}C_{ds}A_{ds}G_{ds}^{m}C_{ds}TₑₒTₑₒTₑₛAₑₛTₑₒ | | |
| | A_{do'}-GalNAc₃-1ₐ | | |

[0914] Capital letters indicate the nucleobase for each nucleoside and ^{m}C indicates a 5-methyl cytosine. Subscripts: “e” indicates a 2′-MOE modified nucleoside; “d” indicates a β-D-2′-deoxyribonucleoside; “s” indicates a phosphorothioate internucleoside linkage (PS); “o” indicates a phosphodiester internucleoside linkage (PO); and “o′” indicates —O—P(═O)(OH)—. Conjugate groups are in bold.

[0915] The structure of GalNAc₃-1ₐ was shown previously in Example 9.

TABLE 46
ApoC III mRNA (% Saline on Day 1) and Plasma TG Levels (% Saline on Day 1)

| ASO | Dose | Target | Day 3 | Day 7 | Day 14 | Day 35 | Day 42 |
|---|---|---|---|---|---|---|---|
| Saline | 0 mg/kg | ApoC-III | 98 | 100 | 100 | 95 | 116 |
| ISIS 304801 | 30 mg/kg | ApoC-III | 28 | 30 | 41 | 65 | 74 |
| ISIS 647535 | 10 mg/kg | ApoC-III | 16 | 19 | 25 | 74 | 94 |
| ISIS 647536 | 10 mg/kg | ApoC-III | 18 | 16 | 17 | 35 | 51 |
| Saline | 0 mg/kg | Plasma TG | 121 | 130 | 123 | 105 | 109 |
| ISIS 304801 | 30 mg/kg | Plasma TG | 34 | 37 | 50 | 69 | 69 |
| ISIS 647535 | 10 mg/kg | Plasma TG | 18 | 14 | 24 | 18 | 71 |
| ISIS 647536 | 10 mg/kg | Plasma TG | 21 | 19 | 15 | 32 | 35 |

[0916] As can be seen in the table above the duration of action increased with addition of the 3′-conjugate group compared to the unconjugated oligonucleotide. There was a further increase in the duration of action for the conjugated mixed PO/PS oligonucleotide 647536 as compared to the conjugated full PS oligonucleotide 647535.

### Example 58: Dose-Dependent Study of Oligonucleotides Comprising a 3′-Conjugate Group (Comparison of GalNAc₃-1 and GalNAc₄-11) Targeting SRB-1 In Vivo

[0917] The oligonucleotides listed below were tested in a dose-dependent study for antisense inhibition of SRB-1 in mice. Unconjugated ISIS 440762 was included as an unconjugated standard. Each of the conjugate groups were attached at the 3′ terminus of the respective oligonucleotide by a phosphodiester linked 2′-deoxyadenosine nucleoside cleavable moiety.

[0918] The structure of GalNAc₃-1ₐ was shown previously in Example 9. The structure of GalNAc₃-11ₐ was shown previously in Example 50.

### Treatment

[0919] Six week old male Balb/c mice (Jackson Laboratory, Bar Harbor, ME) were injected subcutaneously once at the dosage shown below with ISIS 440762, 651900, 663748 or with saline. Each treatment group consisted of 4 animals. The mice were sacrificed 72 hours following the final administration to determine the liver SRB-1 mRNA levels using real-time PCR and RIBOGREEN® RNA quantification reagent (Molecular Probes, Inc. Eugene, OR) according to standard protocols. The results below are presented as the average percent of SRB-1 mRNA levels for each treatment group, normalized to the saline control.

[0920] As illustrated in Table 47, treatment with antisense oligonucleotides lowered SRB-1 mRNA levels in a dose-dependent manner. The antisense oligonucleotides comprising the phosphodiester linked GalNAc₃-1 and GalNAc₄-11 conjugates at the 3′ terminus (ISIS 651900 and ISIS 663748) showed substantial improvement in potency compared to the unconjugated antisense oligonucleotide (ISIS 440762). The two conjugated oligonucleotides, GalNAc₃-1 and GalNAc₄-11, were equipotent.

TABLE 47
Modified ASO targeting SRB-1

| | Sequence | Dose | % Saline | SEQ ID |
|---|---|---|---|---|
| ASO | (5′ to 3′) | mg/kg | control | No. |
| Saline | | | 100 | |
| ISIS | Tₖₛ^{m}CₖₛA_{ds}G_{ds}T_{ds}^{m}C_{ds}A_{ds} | 0.6 | 73.45 | 2250 |
| 440762 | T_{ds}G_{ds}A_{ds}^{m}C_{ds}T_{ds}Tₖₛ^{m}Cₖ | 2 | 59.66 | |
| | | 6 | 23.50 | |
| ISIS | Tₖₛ^{m}CₖₛA_{ds}G_{ds}T_{ds}^{m}C_{ds}A_{ds} | 0.2 | 62.75 | 2251 |
| 651900 | T_{ds}G_{ds}A_{ds}^{m}C_{ds}T_{ds}Tₖₛ^{m}Cₖₒ | 0.6 | 29.14 | |
| | A_{do'}-GalNAC₃-1ₐ | 2 | 8.61 | |
| | | 6 | 5.62 | |
| ISIS | Tₖₛ^{m}CₖₛA_{ds}G_{ds}T_{ds}^{m}C_{ds}A_{ds} | 0.2 | 63.99 | 2251 |
| 663748 | T_{ds}G_{ds}A_{ds}^{m}C_{ds}T_{ds}Tₖₛ^{m}Cₖₒ | 0.6 | 33.53 | |
| | A_{do'}-GalNAC₄-11ₐ | 2 | 7.58 | |
| | | 6 | 5.52 | |

[0921] Capital letters indicate the nucleobase for each nucleoside and ^{m}C indicates a 5-methyl cytosine. Subscripts: “e” indicates a 2′-MOE modified nucleoside; “k” indicates 6′-(S)—CH₃ bicyclic nucleoside; “d” indicates a β-D-2′-deoxyribonucleoside; “s” indicates a phosphorothioate internucleoside linkage (PS); “o” indicates a phosphodiester internucleoside linkage (PO); and “o′” indicates —O—P(U)(OH)—. Conjugate groups are in bold.

[0922] Liver transaminase levels, alanine aminotransferase (ALT) and aspartate aminotransferase (AST), in serum were measured relative to saline injected mice using standard protocols. Total bilirubin and BUN were also evaluated. The change in body weights was evaluated with no significant change from the saline group. ALTs, ASTs, total bilirubin and BUN values are shown in Table 48 below.

TABLE 48

| | Dosage | | | Total | | |
|---|---|---|---|---|---|---|
| ISIS No. | mg/kg | ALT | AST | Bilirubin | BUN | Conjugate |
| Saline | | 30 | 76 | 0.2 | 40 | |
| 440762 | 0.60 | 32 | 70 | 0.1 | 35 | none |
| | 2 | 26 | 57 | 0.1 | 35 | |
| | 6 | 31 | 48 | 0.1 | 39 | |
| 651900 | 0.2 | 32 | 115 | 0.2 | 39 | GalNac₃-1 (3′) |
| | 0.6 | 33 | 61 | 0.1 | 35 | |
| | 2 | 30 | 50 | 0.1 | 37 | |
| | 6 | 34 | 52 | 0.1 | 36 | |
| 663748 | 0.2 | 28 | 56 | 0.2 | 36 | GalNac₄-11 (3′) |
| | 0.6 | 34 | 60 | 0.1 | 35 | |
| | 2 | 44 | 62 | 0.1 | 36 | |
| | 6 | 38 | 71 | 0.1 | 33 | |

### Example 59: Effects of GalNAc₃-1 Conjugated ASOs Targeting FXI In Vivo

[0923] The oligonucleotides listed below were tested in a multiple dose study for antisense inhibition of FXI in mice. ISIS 404071 was included as an unconjugated standard. Each of the conjugate groups was attached at the 3′ terminus of the respective oligonucleotide by a phosphodiester linked 2′-deoxyadenosine nucleoside cleavable moiety.

TABLE 49
Modified ASOs targeting FXI

| | | | SEQ ID |
|---|---|---|---|
| ASO | Sequence (5′ to 3′) | Linkages | No. |
| ISIS | TₑₛGₑₛGₑₛTₑₛAₑₛA_{ds}T_{ds}^{m}C_{ds}^{m}C_{ds} | PS | 2259 |
| 404071 | A_{ds}^{m}C_{ds}T_{ds}T_{ds}T_{ds}^{m}C_{ds}AₑₛGₑₛAₑₛ | | |
| | GₑₛGₑ | | |
| ISIS | TₑₛGₑₛGₑₛTₑₛAₑₛA_{ds}T_{ds}^{m}C_{ds}^{m}C_{ds} | PS | 2260 |
| 656172 | A_{ds}^{m}C_{ds}T_{ds}T_{ds}T_{ds}^{m}C_{ds}AₑₛGₑₛAₑₛ | | |
| | GₑₛGₑₒA_{do}-GalNAc₃-1ₐ | | |
| ISIS | TₑₛGₑₒGₑₒTₑₒAₑₒA_{ds}T_{ds}^{m}C_{ds}^{m}C_{ds} | PO/PS | 2260 |
| 656173 | A_{ds}^{m}C_{ds}T_{ds}T_{ds}T_{ds}^{m}C_{ds}AₑₒGₑₒAₑₛ | | |
| | GₑₛGₑₒA_{do}′-GalNAc₃-1ₐ | | |

[0924] Capital letters indicate the nucleobase for each nucleoside and ^{m}C indicates a 5-methyl cytosine. Subscripts: “e” indicates a 2′-MOE modified nucleoside; “d” indicates a β-D-2′-deoxyribonucleoside; “s” indicates a phosphorothioate internucleoside linkage (PS); “o” indicates a phosphodiester internucleoside linkage (PO); and “o′” indicates —O—P(═O)(OH)—. Conjugate groups are in bold.

[0925] The structure of GalNAc₃-1ₐ was shown previously in Example 9.

### Treatment

[0926] Six week old male Balb/c mice (Jackson Laboratory, Bar Harbor, ME) were injected subcutaneously twice a week for 3 weeks at the dosage shown below with ISIS 404071, 656172, 656173 or with PBS treated control. Each treatment group consisted of 4 animals. The mice were sacrificed 72 hours following the final administration to determine the liver FXI mRNA levels using real-time PCR and RIBOGREEN® RNA quantification reagent (Molecular Probes, Inc. Eugene, OR) according to standard protocols. Plasma FXI protein levels were also measured using ELISA. FXI mRNA levels were determined relative to total RNA (using RIBOGREEN®), prior to normalization to PBS-treated control. The results below are presented as the average percent of FXI mRNA levels for each treatment group. The data was normalized to PBS-treated control and is denoted as “% PBS”. The ED₅₀s were measured using similar methods as described previously and are presented below.

TABLE 50
Factor XI mRNA (% Saline)

| | Dose | % | | |
|---|---|---|---|---|
| ASO | mg/kg | Control | Conjugate | Linkages |
| Saline | | 100 | none | |
| ISIS | 3 | 92 | none | PS |
| 404071 | 10 | 40 | | |
| | 30 | 15 | | |
| ISIS | 0.7 | 74 | GalNAc₃-1 | PS |
| 656172 | 2 | 33 | | |
| | 6 | 9 | | |
| ISIS | 0.7 | 49 | GalNAc₃-1 | PO/PS |
| 656173 | 2 | 22 | | |
| | 6 | 1 | | |

[0927] As illustrated in Table 50, treatment with antisense oligonucleotides lowered FXI mRNA levels in a dose-dependent manner. The oligonucleotides comprising a 3′-GalNAc₃-1 conjugate group showed substantial improvement in potency compared to the unconjugated antisense oligonucleotide (ISIS 404071). Between the two conjugated oligonucleotides an improvement in potency was further provided by substituting some of the PS linkages with PO (ISIS 656173).

[0928] As illustrated in Table 50a, treatment with antisense oligonucleotides lowered FXI protein levels in a dose-dependent manner. The oligonucleotides comprising a 3′-GalNAc₃-1 Conjugate group showed substantial improvement in potency compared to the unconjugated antisense oligonucleotide (ISIS 404071). Between the two conjugated oligonucleotides an improvement in potency was further provided by substituting some of the PS linkages with PO (ISIS 656173).

TABLE 50a
Factor XI protein (% Saline)

| | Dose | Protein (% | | |
|---|---|---|---|---|
| ASO | mg/kg | Control) | Conjugate | Linkages |
| Saline | | 100 | none | |
| ISIS | 3 | 127 | none | PS |
| 404071 | 10 | 32 | | |
| | 30 | 3 | | |
| ISIS | 0.7 | 70 | GalNAc₃-1 | PS |
| 656172 | 2 | 23 | | |
| | 6 | 1 | | |
| ISIS | 0.7 | 45 | GalNAc₃-1 | PO/PS |
| 656173 | 2 | 6 | | |
| | 6 | 0 | | |

[0929] Liver transaminase levels, alanine aminotransferase (ALT) and aspartate aminotransferase (AST), in serum were measured relative to saline injected mice using standard protocols. Total bilirubin, total albumin, CRE and BUN were also evaluated. The change in body weights was evaluated with no significant change from the saline group. ALTs, ASTs, total bilirubin and BUN values are shown in the table below.

TABLE 51

| | Dosage | | | Total | Total | | | |
|---|---|---|---|---|---|---|---|---|
| ISIS No. | mg/kg | ALT | AST | Albumin | Bilirubin | CRE | BUN | Conjugate |
| Saline | | 71.8 | 84.0 | 3.1 | 0.2 | 0.2 | 22.9 | |
| 404071 | 3 | 152.8 | 176.0 | 3.1 | 0.3 | 0.2 | 23.0 | none |
| | 10 | 73.3 | 121.5 | 3.0 | 0.2 | 0.2 | 21.4 | |
| | 30 | 82.5 | 92.3 | 3.0 | 0.2 | 0.2 | 23.0 | |
| 656172 | 0.7 | 62.5 | 111.5 | 3.1 | 0.2 | 0.2 | 23.8 | GalNac₃-1 (3′) |
| | 2 | 33.0 | 51.8 | 2.9 | 0.2 | 0.2 | 22.0 | |
| | 6 | 65.0 | 71.5 | 3.2 | 0.2 | 0.2 | 23.9 | |
| 656173 | 0.7 | 54.8 | 90.5 | 3.0 | 0.2 | 0.2 | 24.9 | GalNac₃-1 (3′) |
| | 2 | 85.8 | 71.5 | 3.2 | 0.2 | 0.2 | 21.0 | |
| | 6 | 114.0 | 101.8 | 3.3 | 0.2 | 0.2 | 22.7 | |

### Example 60: Effects of Conjugated ASOs Targeting SRB-1 In Vitro

[0930] The oligonucleotides listed below were tested in a multiple dose study for antisense inhibition of SRB-1 in primary mouse hepatocytes. ISIS 353382 was included as an unconjugated standard. Each of the conjugate groups were attached at the 3′ or 5′ terminus of the respective oligonucleotide by a phosphodiester linked 2′-deoxyadenosine nucleoside cleavable moiety.

TABLE 52
Modified ASO targeting SRB-1

| | | | | SEQ |
|---|---|---|---|---|
| ASO | Sequence (5′ to 3′) | Motif | Conjugate | ID No. |
| ISIS 353382 | Gₑₛ^{m}CₑₛTₑₛTₑₛ^{m}CₑₛA_{ds}G_{ds}T_{ds}^{m}C_{ds}A_{ds}T_{ds}G_{ds}A_{ds}^{m} | 5/10/5 | none | 2256 |
| | C_{ds}T_{ds}Tₑₛ^{m}Cₑₛ^{m}CₑₛTₑₛTₑ | | | |
| ISIS 655861 | Gₑₛ^{m}CₑₛTₑₛTₑₛ^{m}CₑₛA_{ds}G_{ds}T_{ds}^{m}C_{ds}A_{ds}T_{ds}G_{ds}A_{ds}^{m} | 5/10/5 | GalNAc₃-1 | 2257 |
| | C_{ds}T_{ds}Tₑₛ^{m}Cₑₛ^{m}CₑₛTₑₛTₑₒA_{do′}-GalNAc₃-1ₐ | | | |
| ISIS 655862 | Gₑₛ^{m}CₑₒTₑₒTₑₒ^{m}CₑₒA_{ds}G_{ds}T_{ds}^{m}C_{ds}A_{ds}T_{ds}G_{ds}A_{ds}^{m} | 5/10/5 | GalNAc₃-1 | 2257 |
| | C_{ds}T_{ds}TₑₒmCₑₒmCₑₛTₑₛTₑₒA_{do′}-GalNAc₃-1ₐ | | | |
| ISIS 661161 | GalNAc₃-3_{a-o′}A_{do}Gₑₛ^{m}CₑₛTₑₛTₑₛ^{m}CₑₛA_{ds}G_{ds} | 5/10/5 | GalNAc₃-3 | 2258 |
| | T_{ds}^{m}C_{ds}A_{ds}T_{ds}G_{ds}A_{ds}^{m}C_{ds}T_{ds}Tₑₛ^{m}Cₑₛ^{m}CₑₛTₑₛTₑ | | | |
| ISIS 665001 | GalNAc₃-8_{a-o′}A_{do}Gₑₛ^{m}CₑₛTₑₛTₑₛ^{m}CₑₛA_{ds}G_{ds} | 5/10/5 | GalNAc₃-8 | 2258 |
| | T_{ds}^{m}C_{ds}A_{ds}T_{ds}G_{ds}A_{ds}^{m}C_{ds}T_{ds}Tₑₛ^{m}Cₑₛ^{m}CₑₛTₑₛTₑ | | | |
| ISIS 664078 | Gₑₛ^{m}CₑₛTₑₛTₑₛ^{m}CₑₛA_{ds}G_{ds}T_{ds}^{m}C_{ds}A_{ds}T_{ds}G_{ds}A_{ds}^{m} | 5/10/5 | GalNAc₃-9 | 2257 |
| | C_{ds}T_{ds}Tₑₛ^{m}Cₑₛ^{m}CₑₛTₑₛTₑₒA_{do′}-GalNAc₃-9ₐ | | | |
| ISIS 666961 | GalNAc₃-6_{a-o′}A_{do}Gₑₛ^{m}CₑₛTₑₛTₑₛ^{m}CₑₛA_{ds}G_{ds} | 5/10/5 | GalNAc₃-6 | 2258 |
| | T_{ds}^{m}C_{ds}A_{ds}T_{ds}G_{ds}A_{ds}^{m}C_{ds}T_{ds}Tₑₛ^{m}Cₑₛ^{m}CₑₛTₑₛTₑ | | | |
| ISIS 664507 | GalNAc₃-2_{a-o′}A_{do}Gₑₛ^{m}CₑₛTₑₛTₑₛ^{m}CₑₛA_{ds}G_{ds} | 5/10/5 | GalNAc₃-2 | 2258 |
| | T_{ds}^{m}C_{ds}A_{ds}T_{ds}G_{ds}A_{ds}^{m}C_{ds}T_{ds}Tₑₛ^{m}Cₑₛ^{m}CₑₛTₑₛTₑ | | | |
| ISIS 666881 | GalNAc₃-10_{a-o′}A_{do}Gₑₛ^{m}CₑₛTₑₛTₑₛ^{m}CₑₛA_{ds}G_{ds} | 5/10/5 | GalNAc₃-10 | 2258 |
| | T_{ds}^{m}C_{ds}A_{ds}T_{ds}G_{ds}A_{ds}^{m}C_{ds}T_{ds}Tₑₛ^{m}Cₑₛ^{m}CₑₛTₑₛTₑ | | | |
| ISIS 666224 | GalNAc₃-5_{a-o′}A_{do}Gₑₛ^{m}CₑₛTₑₛTₑₛ^{m}CₑₛA_{ds}G_{ds} | 5/10/5 | GalNAc₃-5 | 2258 |
| | T_{ds}^{m}C_{ds}A_{ds}T_{ds}G_{ds}A_{ds}^{m}C_{ds}T_{ds}Tₑₛ^{m}Cₑₛ^{m}CₑₛTₑₛTₑ | | | |
| ISIS 666981 | GalNAc₃-7_{a-o′}A_{do}Gₑₛ^{m}CₑₛTₑₛTₑₛ^{m}CₑₛA_{ds}G_{ds} | 5/10/5 | GalNAc₃-7 | 2258 |
| | T_{ds}^{m}C_{ds}A_{ds}T_{ds}G_{ds}A_{ds}^{m}C_{ds}T_{ds}Tₑₛ^{m}Cₑₛ^{m}CₑₛTₑₛTₑ | | | |

[0931] Capital letters indicate the nucleobase for each nucleoside and ^{m}C indicates a 5-methyl cytosine. Subscripts: “e” indicates a 2′-MOE modified nucleoside; “d” indicates a β-D-2′-deoxyribonucleoside; “s” indicates a phosphorothioate internucleoside linkage (PS); “o” indicates a phosphodiester internucleoside linkage (PO); and “o′” indicates —O—P(═O)(OH)—. Conjugate groups are in bold.

[0932] The structure of GalNAc₃-1ₐ was shown previously in Example 9. The structure of GalNAc₃-3a was shown previously in Example 39. The structure of GalNAc₃-8a was shown previously in Example 47. The structure of GalNAc₃-9a was shown previously in Example 52. The structure of GalNAc₃-6a was shown previously in Example 51. The structure of GalNAc₃-2a was shown previously in Example 37. The structure of GalNAc₃-10a was shown previously in Example 46. The structure of GalNAc₃-5a was shown previously in Example 49. The structure of GalNAc₃-7a was shown previously in Example 48.

### Treatment

[0933] The oligonucleotides listed above were tested in vitro in primary mouse hepatocyte cells plated at a density of 25,000 cells per well and treated with 0.03, 0.08, 0.24, 0.74, 2.22, 6.67 or 20 nM modified oligonucleotide. After a treatment period of approximately 16 hours, RNA was isolated from the cells and mRNA levels were measured by quantitative real-time PCR and the SRB-1 mRNA levels were adjusted according to total RNA content, as measured by RIBOGREEN®.

[0934] The IC₅₀ was calculated using standard methods and the results are presented in Table 53. The results show that, under free uptake conditions in which no reagents or electroporation techniques are used to artificially promote entry of the oligonucleotides into cells, the oligonucleotides comprising a GalNAc conjugate were significantly more potent in hepatocytes than the parent oligonucleotide (ISIS 353382) that does not comprise a GalNAc conjugate.

TABLE 53

| | | Internucleoside | | SEQ ID |
|---|---|---|---|---|
| ASO | IC₅₀ (nM) | linkages | Conjugate | No. |
| ISIS 353382 | 190^{a} | PS | none | 2256 |
| ISIS 655861 | 11^{a} | PS | GalNAc₃-1 | 2257 |
| ISIS 655862 | 3 | PO/PS | GalNAc₃-1 | 2257 |
| ISIS 661161 | 15^{a} | PS | GalNAc₃-3 | 2258 |
| ISIS 665001 | 20 | PS | GalNAc₃-8 | 2258 |
| ISIS 664078 | 55 | PS | GalNAc₃-9 | 2257 |
| ISIS 666961 | 22^{a} | PS | GalNAc₃-6 | 2258 |
| ISIS 664507 | 30 | PS | GalNAc₃-2 | 2258 |
| ISIS 666881 | 30 | PS | GalNAc₃-10 | 2258 |
| ISIS 666224 | 30^{a} | PS | GalNAc₃-5 | 2258 |
| ISIS 666981 | 40 | PS | GalNAc₃-7 | 2258 |

^{a}Average of multiple runs.

### Example 61: Preparation of Oligomeric Compound 175 Comprising GalNAc₃-12

[chemical structure]

[chemical structure]

[chemical structure]

[chemical structure]

[0935] Compound 169 is commercially available. Compound 172 was prepared by addition of benzyl (perfluorophenyl) glutarate to compound 171. The benzyl (perfluorophenyl) glutarate was prepared by adding PFP-TFA and DIEA to 5-(benzyloxy)-5-oxopentanoic acid in DMF. Oligomeric compound 175, comprising a GalNAc₃-12 conjugate group, was prepared from compound 174 using the general procedures illustrated in Example 46. The GalNAc₃ cluster portion of the conjugate group GalNAc₃-12 (GalNAc₃-12ₐ) can be combined with any cleavable moiety to provide a variety of conjugate groups. In a certain embodiments, the cleavable moiety is —P(═O)(OH)-A_{d}-P(═O)(OH)—. The structure of GalNAc₃-12 (GalNAc₃-12a-CM-) is shown below:

[chemical structure]

### Example 62: Preparation of Oligomeric Compound 180 Comprising GalNAc₃-13

[chemical structure]

[chemical structure]

[0936] Compound 176 was prepared using the general procedure shown in Example 2. Oligomeric compound 180, comprising a GalNAc₃-13 conjugate group, was prepared from compound 177 using the general procedures illustrated in Example 49. The GalNAc₃ cluster portion of the conjugate group GalNAc₃-13 (GalNAc₃-13ₐ) can be combined with any cleavable moiety to provide a variety of conjugate groups. In a certain embodiments, the cleavable moiety is —P(═O)(OH)-A_{d}-P(═O)(OH)—. The structure of GalNAc₃-13 (GalNAc₃-13ₐ-CM-) is shown below:

[chemical structure]

### Example 63: Preparation of Oligomeric Compound 188 Comprising GalNAc₃-14

[chemical structure]

[chemical structure]

[chemical structure]

[0937] Compounds 181 and 185 are commercially available. Oligomeric compound 188, comprising a GalNAc₃-14 conjugate group, was prepared from compound 187 using the general procedures illustrated in Example 46. The GalNAc₃ cluster portion of the conjugate group GalNAc₃-14 (GalNAc₃-14ₐ) can be combined with any cleavable moiety to provide a variety of conjugate groups. In certain embodiments, the cleavable moiety is —P(═O)(OH)-A_{d}-P(═O)(OH)—. The structure of GalNAc₃-14 (GalNAc₃-14ₐ-CM-) is shown below:

[chemical structure]

### Example 64: Preparation of Oligomeric Compound 197 Comprising GalNAc₃-15

[chemical structure]

[chemical structure]

[0938] Compound 189 is commercially available. Compound 195 was prepared using the general procedure shown in Example 31. Oligomeric compound 197, comprising a GalNAc₃-15 conjugate group, was prepared from compounds 194 and 195 using standard oligonucleotide synthesis procedures. The GalNAc₃ cluster portion of the conjugate group GalNAc₃-15 (GalNAc₃-15ₐ) can be combined with any cleavable moiety to provide a variety of conjugate groups. In certain embodiments, the cleavable moiety is —P(═O)(OH)-A_{d}-P(═O)(OH)—. The structure of GalNAc₃-15 (GalNAc₃-15ₐ-CM-) is shown below:

[chemical structure]

### Example 65: Dose-Dependent Study of Oligonucleotides Comprising a 5′-Conjugate Group (Comparison of GalNAc₃-3, 12, 13, 14, and 15) Targeting SRB-1 In Vivo

[0939] The oligonucleotides listed below were tested in a dose-dependent study for antisense inhibition of SRB-1 in mice. Unconjugated ISIS 353382 was included as a standard. Each of the GalNAc₃ conjugate groups was attached at the 5′ terminus of the respective oligonucleotide by a phosphodiester linked 2′-deoxyadenosine nucleoside (cleavable moiety).

TABLE 54
Modified ASOs targeting SRB-1

| ISIS | | | SEQ |
|---|---|---|---|
| No. | Sequence (5′ to 3′) | Conjugate | ID No. |
| 353382 | Gₑₛ^{m}CₑₛTₑₛTₑₛ^{m}CₑₛA_{ds}G_{ds}T_{ds}^{m} | none | 2256 |
| | C_{ds}A_{ds}T_{ds}G_{ds}A_{ds}^{m}C_{ds}T_{ds}Tₑₛ^{m} | | |
| | Cₑₛ^{m}CₑₛTₑₛTₑ | | |
| 661161 | GalNAc₃-3_{a-o′}A_{do}Gₑₛ^{m}CₑₛTₑₛ | GalNAc₃-3 | 2258 |
| | Tₑₛ^{m}CₑₛA_{ds}G_{ds}T_{ds}^{m}C_{ds}A_{ds}T_{ds}G_{ds} | | |
| | A_{ds}^{m}C_{ds}T_{ds}Tₑₛ^{m}Cₑₛ^{m}CₑₛTₑₛTₑ | | |
| 671144 | GalNAc₃-12_{a-o′}A_{do}Gₑₛ^{m}CₑₛTₑₛ | GalNAc₃-12 | 2258 |
| | Tₑₛ^{m}CₑₛA_{ds}G_{ds}T_{ds}^{m}C_{ds}A_{ds}T_{ds}G_{ds} | | |
| | A_{ds}^{m}C_{ds}T_{ds}Tₑₛ^{m}Cₑₛ^{m}CₑₛTₑₛTₑ | | |
| 670061 | GalNAc₃-13_{a-o′}A_{do}Gₑₛ^{m}CₑₛTₑₛ | GalNAc₃-13 | 2258 |
| | Tₑₛ^{m}CₑₛA_{ds}G_{ds}T_{ds}^{m}C_{ds}A_{ds}T_{ds}G_{ds} | | |
| | A_{ds}^{m}C_{ds}T_{ds}Tₑₛ^{m}Cₑₛ^{m}CₑₛTₑₛTₑ | | |
| 671261 | GalNAc₃-14_{a-o′}A_{do}Gₑₛ^{m}CₑₛTₑₛ | GalNAc₃-14 | 2258 |
| | Tₑₛ^{m}CₑₛA_{ds}G_{ds}T_{ds}^{m}C_{ds}A_{ds}T_{ds}G_{ds} | | |
| | A_{ds}^{m}C_{ds}T_{ds}Tₑₛ^{m}Cₑₛ^{m}CₑₛTₑₛTₑ | | |
| 671262 | GalNAc₃-15_{a-o′}A_{do}Gₑₛ^{m}CₑₛTₑₛ | GalNAc₃-15 | 2258 |
| | Tₑₛ^{m}CₑₛA_{ds}G_{ds}T_{ds}^{m}C_{ds}A_{ds}T_{ds}G_{ds} | | |
| | A_{ds}^{m}C_{ds}T_{ds}Tₑₛ^{m}Cₑₛ^{m}CₑₛTₑₛTₑ | | |

[0940] Capital letters indicate the nucleobase for each nucleoside and mC indicates a 5-methyl cytosine. Subscripts: “e” indicates a 2′-MOE modified nucleoside; “d” indicates a β-D-2′-deoxyribonucleoside; “s” indicates a phosphorothioate internucleoside linkage (PS); “o” indicates a phosphodiester internucleoside linkage (PO); and “o′” indicates —O—P(═O)(OH)—. Conjugate groups are in bold.

[0941] The structure of GalNAc₃-3ₐ was shown previously in Example 39. The structure of GalNAc₃-12a was shown previously in Example 61. The structure of GalNAc₃-13a was shown previously in Example 62. The structure of GalNAc₃-14a was shown previously in Example 63. The structure of GalNAc₃-15a was shown previously in Example 64.

### Treatment

[0942] Six to eight week old C57bl6 mice (Jackson Laboratory, Bar Harbor, ME) were injected subcutaneously once or twice at the dosage shown below with ISIS 353382, 661161, 671144, 670061, 671261, 671262, or with saline. Mice that were dosed twice received the second dose three days after the first dose. Each treatment group consisted of 4 animals. The mice were sacrificed 72 hours following the final administration to determine the liver SRB-1 mRNA levels using real-time PCR and RIBOGREEN® RNA quantification reagent (Molecular Probes, Inc. Eugene, OR) according to standard protocols. The results below are presented as the average percent of SRB-1 mRNA levels for each treatment group, normalized to the saline control.

[0943] As illustrated in Table 55, treatment with antisense oligonucleotides lowered SRB-1 mRNA levels in a dose-dependent manner. No significant differences in target knockdown were observed between animals that received a single dose and animals that received two doses (see ISIS 353382 dosages 30 and 2×15 mg/kg; and ISIS 661161 dosages 5 and 2×2.5 mg/kg). The antisense oligonucleotides comprising the phosphodiester linked GalNAc₃-3, 12, 13, 14, and 15 conjugates showed substantial improvement in potency compared to the unconjugated antisense oligonucleotide (ISIS 335382).

TABLE 55
SRB-1 mRNA (% Saline)

| | Dosage | SRB-1 mRNA | ED₅₀ | |
|---|---|---|---|---|
| ISIS No. | (mg/kg) | (% Saline) | (mg/kg) | Conjugate |
| Saline | n/a | 100.0 | n/a | n/a |
| 353382 | 3 | 85.0 | 22.4 | none |
| | 10 | 69.2 | | |
| | 30 | 34.2 | | |
| | 2 × 15 | 36.0 | | |
| 661161 | 0.5 | 87.4 | 2.2 | GalNAc₃-3 |
| | 1.5 | 59.0 | | |
| | 5 | 25.6 | | |
| | 2 × 2.5 | 27.5 | | |
| | 15 | 17.4 | | |
| 671144 | 0.5 | 101.2 | 3.4 | GalNAc₃-12 |
| | 1.5 | 76.1 | | |
| | 5 | 32.0 | | |
| | 15 | 17.6 | | |
| 670061 | 0.5 | 94.8 | 2.1 | GalNAc₃-13 |
| | 1.5 | 57.8 | | |
| | 5 | 20.7 | | |
| | 15 | 13.3 | | |
| 671261 | 0.5 | 110.7 | 4.1 | GalNAc₃-14 |
| | 1.5 | 81.9 | | |
| | 5 | 39.8 | | |
| | 15 | 14.1 | | |
| 671262 | 0.5 | 109.4 | 9.8 | GalNAc₃-15 |
| | 1.5 | 99.5 | | |
| | 5 | 69.2 | | |
| | 15 | 36.1 | | |

[0944] Liver transaminase levels, alanine aminotransferase (ALT) and aspartate aminotransferase (AST), in serum were measured relative to saline injected mice using standard protocols. Total bilirubin and BUN were also evaluated. The changes in body weights were evaluated with no significant differences from the saline group (data not shown). ALTs, ASTs, total bilirubin and BUN values are shown in Table 56 below.

TABLE 56

| | | | | Total | | |
|---|---|---|---|---|---|---|
| | Dosage | ALT | AST | Bilirubin | BUN | |
| ISIS No. | (mg/kg) | (U/L) | (U/L) | (mg/dL) | (mg/dL) | Conjugate |
| Saline | n/a | 28 | 60 | 0.1 | 39 | n/a |
| 353382 | 3 | 30 | 77 | 0.2 | 36 | none |
| | 10 | 25 | 78 | 0.2 | 36 | |
| | 30 | 28 | 62 | 0.2 | 35 | |
| | 2 × 15 | 22 | 59 | 0.2 | 33 | |
| 661161 | 0.5 | 39 | 72 | 0.2 | 34 | GalNAc₃-3 |
| | 1.5 | 26 | 50 | 0.2 | 33 | |
| | 5 | 41 | 80 | 0.2 | 32 | |
| | 2 × 2.5 | 24 | 72 | 0.2 | 28 | |
| | 15 | 32 | 69 | 0.2 | 36 | |
| 671144 | 0.5 | 25 | 39 | 0.2 | 34 | GalNAc₃-12 |
| | 1.5 | 26 | 55 | 0.2 | 28 | |
| | 5 | 48 | 82 | 0.2 | 34 | |
| | 15 | 23 | 46 | 0.2 | 32 | |
| 670061 | 0.5 | 27 | 53 | 0.2 | 33 | GalNAc₃-13 |
| | 1.5 | 24 | 45 | 0.2 | 35 | |
| | 5 | 23 | 58 | 0.1 | 34 | |
| | 15 | 24 | 72 | 0.1 | 31 | |
| 671261 | 0.5 | 69 | 99 | 0.1 | 33 | GalNAc₃-14 |
| | 1.5 | 34 | 62 | 0.1 | 33 | |
| | 5 | 43 | 73 | 0.1 | 32 | |
| | 15 | 32 | 53 | 0.2 | 30 | |
| 671262 | 0.5 | 24 | 51 | 0.2 | 29 | GalNAc₃-15 |
| | 1.5 | 32 | 62 | 0.1 | 31 | |
| | 5 | 30 | 76 | 0.2 | 32 | |
| | 15 | 31 | 64 | 0.1 | 32 | |

### Example 66: Effect of Various Cleavable Moieties on Antisense Inhibition In Vivo by Oligonucleotides Targeting SRB-1 Comprising a 5′-GalNAc₃ Cluster

[0945] The oligonucleotides listed below were tested in a dose-dependent study for antisense inhibition of SRB-1 in mice. Each of the GalNAc₃ conjugate groups was attached at the 5′ terminus of the respective oligonucleotide by a phosphodiester linked nucleoside (cleavable moiety (CM)).

TABLE 57
Modified ASOs targeting SRB-1

| | | | | SEQ |
|---|---|---|---|---|
| ISIS | | GalNAc₃ | | ID |
| No. | Sequence (5′ to 3′) | Cluster | CM | No. |
| 661161 | GalNAc₃-3_{a-o′}A_{do}Gₑₛ^{m}CₑₛTₑₛ | GalNAc₃-3a | A_{d} | 2258 |
| | Tₑₛ^{m}CₑₛA_{ds}G_{ds}T_{ds}^{m}C_{ds}A_{ds}T_{ds}G_{ds} | | | |
| | A_{ds}^{m}C_{ds}T_{ds}Tₑₛ^{m}Cₑₛ^{m}CₑₛTₑₛTₑ | | | |
| 670699 | GalNAc₃-3_{a-o′}T_{do}Gₑₛ^{m}CₑₒTₑₒ | GalNAc₃-3a | T_{d} | 2261 |
| | Tₑₒ^{m}CₑₒA_{ds}G_{ds}T_{ds}^{m}C_{ds}A_{ds}T_{ds}G_{ds} | | | |
| | A_{ds}^{m}C_{ds}T_{ds}Tₑₒ^{m}Cₑₒ^{m}CₑₛTₑₛTₑ | | | |
| 670700 | GalNAc₃-3_{a-o′}AₑₒGₑₛ^{m}CₑₒTₑₒ | GalNAc₃-3a | Aₑ | 2258 |
| | Tₑₒ^{m}CₑₒA_{ds}G_{ds}T_{ds}^{m}C_{ds}A_{ds}T_{ds}G_{ds} | | | |
| | A_{ds}^{m}C_{ds}T_{ds}Tₑₒ^{m}Cₑₒ^{m}CₑₛTₑₛTₑ | | | |
| 670701 | GalNAc₃-3_{a-o′}TₑₒGₑₛ^{m}CₑₒTₑₒ | GalNAc₃-3a | Tₑ | 2261 |
| | Tₑₒ^{m}CₑₒA_{ds}G_{ds}T_{ds}^{m}C_{ds}A_{ds}T_{ds}G_{ds} | | | |
| | A_{ds}^{m}C_{ds}T_{ds}Tₑₒ^{m}Cₑₒ^{m}CₑₛTₑₛTₑ | | | |
| 671165 | GalNAc₃-13_{a-o′}A_{do}Gₑₛ^{m}CₑₒTₑₒ | GalNAc₃-13a | A_{d} | 2258 |
| | Tₑₒ^{m}CₑₒA_{ds}G_{ds}T_{ds}^{m}C_{ds}A_{ds}T_{ds}G_{ds} | | | |
| | A_{ds}^{m}C_{ds}T_{ds}Tₑₒ^{m}Cₑₒ^{m}CₑₛTₑₛTₑ | | | |

[0946] Capital letters indicate the nucleobase for each nucleoside and ^{m}C indicates a 5-methyl cytosine. Subscripts: “e” indicates a 2′-MOE modified nucleoside; “d” indicates a β-D-2′-deoxyribonucleoside; “s” indicates a phosphorothioate internucleoside linkage (PS); “o” indicates a phosphodiester internucleoside linkage (PO); and “o′” indicates —O—P(═O)(OH)—. Conjugate groups are in bold.

[0947] The structure of GalNAc₃-3ₐ was shown previously in Example 39. The structure of GalNAc₃-13a was shown previously in Example 62.

### Treatment

[0948] Six to eight week old C57bl6 mice (Jackson Laboratory, Bar Harbor, ME) were injected subcutaneously once at the dosage shown below with ISIS 661161, 670699, 670700, 670701, 671165, or with saline. Each treatment group consisted of 4 animals. The mice were sacrificed 72 hours following the final administration to determine the liver SRB-1 mRNA levels using real-time PCR and RIBOGREEN® RNA quantification reagent (Molecular Probes, Inc. Eugene, OR) according to standard protocols. The results below are presented as the average percent of SRB-1 mRNA levels for each treatment group, normalized to the saline control.

[0949] As illustrated in Table 58, treatment with antisense oligonucleotides lowered SRB-1 mRNA levels in a dose-dependent manner. The antisense oligonucleotides comprising various cleavable moieties all showed similar potencies.

TABLE 58
SRB-1 mRNA (% Saline)

| | Dosage | SRB-1 mRNA | GalNAc₃ | |
|---|---|---|---|---|
| ISIS No. | (mg/kg) | (% Saline) | Cluster | CM |
| Saline | n/a | 100.0 | n/a | n/a |
| 661161 | 0.5 | 87.8 | GalNAc₃-3a | A_{d} |
| | 1.5 | 61.3 | | |
| | 5 | 33.8 | | |
| | 15 | 14.0 | | |
| 670699 | 0.5 | 89.4 | GalNAc₃-3a | T_{d} |
| | 1.5 | 59.4 | | |
| | 5 | 31.3 | | |
| | 15 | 17.1 | | |
| 670700 | 0.5 | 79.0 | GalNAc₃-3a | Aₑ |
| | 1.5 | 63.3 | | |
| | 5 | 32.8 | | |
| | 15 | 17.9 | | |
| 670701 | 0.5 | 79.1 | GalNAc₃-3a | Tₑ |
| | 1.5 | 59.2 | | |
| | 5 | 35.8 | | |
| | 15 | 17.7 | | |
| 671165 | 0.5 | 76.4 | GalNAc₃-13a | A_{d} |
| | 1.5 | 43.2 | | |
| | 5 | 22.6 | | |
| | 15 | 10.0 | | |

[0950] Liver transaminase levels, alanine aminotransferase (ALT) and aspartate aminotransferase (AST), in serum were measured relative to saline injected mice using standard protocols. Total bilirubin and BUN were also evaluated. The changes in body weights were evaluated with no significant differences from the saline group (data not shown). ALTs, ASTs, total bilirubin and BUN values are shown in Table 56 below.

TABLE 59

| | | | | Total | | | |
|---|---|---|---|---|---|---|---|
| | Dosage | ALT | | Bilirubin | BUN | GalNAc₃ | |
| ISIS No. | (mg/kg) | (U/L) | AST (U/L) | (mg/dL) | (mg/dL) | Cluster | CM |
| Saline | n/a | 24 | 64 | 0.2 | 31 | n/a | n/a |
| 661161 | 0.5 | 25 | 64 | 0.2 | 31 | GalNAc₃-3a | A_{d} |
| | 1.5 | 24 | 50 | 0.2 | 32 | | |
| | 5 | 26 | 55 | 0.2 | 28 | | |
| | 15 | 27 | 52 | 0.2 | 31 | | |
| 670699 | 0.5 | 42 | 83 | 0.2 | 31 | GalNAc₃-3a | T_{d} |
| | 1.5 | 33 | 58 | 0.2 | 32 | | |
| | 5 | 26 | 70 | 0.2 | 29 | | |
| | 15 | 25 | 67 | 0.2 | 29 | | |
| 670700 | 0.5 | 40 | 74 | 0.2 | 27 | GalNAc₃-3a | Aₑ |
| | 1.5 | 23 | 62 | 0.2 | 27 | | |
| | 5 | 24 | 49 | 0.2 | 29 | | |
| | 15 | 25 | 87 | 0.1 | 25 | | |
| 670701 | 0.5 | 30 | 77 | 0.2 | 27 | GalNAc₃-3a | Tₑ |
| | 1.5 | 22 | 55 | 0.2 | 30 | | |
| | 5 | 81 | 101 | 0.2 | 25 | | |
| | 15 | 31 | 82 | 0.2 | 24 | | |
| 671165 | 0.5 | 44 | 84 | 0.2 | 26 | GalNAc₃-13a | A_{d} |
| | 1.5 | 47 | 71 | 0.1 | 24 | | |
| | 5 | 33 | 91 | 0.2 | 26 | | |
| | 15 | 33 | 56 | 0.2 | 29 | | |

### Example 67: Preparation of Oligomeric Compound 199 Comprising GalNAc₃-16

[chemical structure]

[0951] Oligomeric compound 199, comprising a GalNAc₃-16 conjugate group, is prepared using the general procedures illustrated in Examples 7 and 9. The GalNAc₃ cluster portion of the conjugate group GalNAc₃-16 (GalNAc₃-16ₐ) can be combined with any cleavable moiety to provide a variety of conjugate groups. In certain embodiments, the cleavable moiety is —P(═O)(OH)-A_{d}-P(═O)(OH)—. The structure of GalNAc₃-16 (GalNAc₃-16ₐ-CM-) is shown below:

[chemical structure]

### Example 68: Preparation of Oligomeric Compound 200 Comprising GalNAc₃-17

[chemical structure]

[0952] Oligomeric compound 200, comprising a GalNAc₃-17 conjugate group, was prepared using the general procedures illustrated in Example 46. The GalNAc₃ cluster portion of the conjugate group GalNAc₃-17 (GalNAc₃-17ₐ) can be combined with any cleavable moiety to provide a variety of conjugate groups. In certain embodiments, the cleavable moiety is —P(═O)(OH)-A_{d}-P(═O)(OH)—. The structure of GalNAc₃-17 (GalNAc₃-17ₐ-CM-) is shown below:

[chemical structure]

### Example 69: Preparation of Oligomeric Compound 201 Comprising GalNAc₃-18

[chemical structure]

[0953] Oligomeric compound 201, comprising a GalNAc₃-18 conjugate group, was prepared using the general procedures illustrated in Example 46. The GalNAc₃ cluster portion of the conjugate group GalNAc₃-18 (GalNAc₃-18ₐ) can be combined with any cleavable moiety to provide a variety of conjugate groups. In certain embodiments, the cleavable moiety is —P(═O)(OH)-A_{d}-P(═O)(OH)—. The structure of GalNAc₃-18 (GalNAc₃-18ₐ-CM-) is shown below:

[chemical structure]

### Example 70: Preparation of Oligomeric Compound 204 Comprising GalNAc₃-19

[chemical structure]

[0954] Oligomeric compound 204, comprising a GalNAc₃-19 conjugate group, was prepared from compound 64 using the general procedures illustrated in Example 52. The GalNAc₃ cluster portion of the conjugate group GalNAc₃-19 (GalNAc₃-19ₐ) can be combined with any cleavable moiety to provide a variety of conjugate groups. In certain embodiments, the cleavable moiety is —P(═O)(OH)-A_{d}-P(═O)(OH)—. The structure of GalNAc₃-19 (GalNAc₃-19ₐ-CM-) is shown below:

[chemical structure]

### Example 71: Preparation of Oligomeric Compound 210 Comprising GalNAc₃-20

[chemical structure]

[chemical structure]

[0955] Compound 205 was prepared by adding PFP-TFA and DIEA to 6-(2,2,2-trifluoroacetamido)hexanoic acid in acetonitrile, which was prepared by adding triflic anhydride to 6-aminohexanoic acid. The reaction mixture was heated to 80° C., then lowered to rt. Oligomeric compound 210, comprising a GalNAc₃-20 conjugate group, was prepared from compound 208 using the general procedures illustrated in Example 52. The GalNAc₃ cluster portion of the conjugate group GalNAc₃-20 (GalNAc₃-20ₐ) can be combined with any cleavable moiety to provide a variety of conjugate groups. In certain embodiments, the cleavable moiety is —P(═O)(OH)-A_{d}-P(═O)(OH)—. The structure of GalNAc₃-20 (GalNAc₃-20ₐ-CM-) is shown below:

[chemical structure]

### Example 72: Preparation of Oligomeric Compound 215 Comprising GalNAc₃-21

[chemical structure]

[0956] Compound 211 is commercially available. Oligomeric compound 215, comprising a GalNAc₃-21 conjugate group, was prepared from compound 213 using the general procedures illustrated in Example 52. The GalNAc₃ cluster portion of the conjugate group GalNAc₃-21 (GalNAc₃-21ₐ) can be combined with any cleavable moiety to provide a variety of conjugate groups. In certain embodiments, the cleavable moiety is —P(═O)(OH)-A_{d}-P(═O)(OH)—. The structure of GalNAc₃-21 (GalNAc₃-21ₐ-CM-) is shown below:

[chemical structure]

### Example 73: Preparation of Oligomeric Compound 221 Comprising GalNAc₃-22

[chemical structure]

[chemical structure]

[0957] Compound 220 was prepared from compound 219 using diisopropylammonium tetrazolide. Oligomeric compound 221, comprising a GalNAc₃-21 conjugate group, is prepared from compound 220 using the general procedure illustrated in Example 52. The GalNAc₃ cluster portion of the conjugate group GalNAc₃-22 (GalNAc₃-22ₐ) can be combined with any cleavable moiety to provide a variety of conjugate groups. In certain embodiments, the cleavable moiety is —P(═O)(OH)-A_{d}-P(═O)(OH)—. The structure of GalNAc₃-22 (GalNAc₃-22ₐ-CM-) is shown below:

[chemical structure]

### Example 74: Effect of Various Cleavable Moieties on Antisense Inhibition In Vivo by Oligonucleotides Targeting SRB-1 Comprising a 5′-GalNAc₃ Conjugate

[0958] The oligonucleotides listed below were tested in a dose-dependent study for antisense inhibition of SRB-1 in mice. Each of the GalNAc₃ conjugate groups was attached at the 5′ terminus of the respective oligonucleotide.

TABLE 60
Modified ASOs targeting SRB-1

| | | | | SEQ |
|---|---|---|---|---|
| ISIS | | GalNAc₃ | | ID |
| No. | Sequence (5′ to 3′) | Cluster | CM | No. |
| 353382 | Gₑₛ^{m}CₑₛTₑₛTₑₛ^{m}CₑₛA_{ds}G_{ds}T_{ds}^{m} | n/a | n/a | 2256 |
| | C_{ds}A_{ds}T_{ds}G_{ds}A_{ds}^{m}C_{ds}T_{ds}Tₑₛ^{m}Cₑₛ^{m} | | | |
| | CₑₛTₑₛTₑ | | | |
| 661161 | GalNAc₃-3_{a-o′}A_{do}Gₑₛ^{m}CₑₛTₑₛ | GalNAc₃- | A_{d} | 2258 |
| | Tₑₛ^{m}CₑₛA_{ds}G_{ds}T_{ds}^{m}C_{ds}A_{ds}T_{ds}G_{ds} | 3a | | |
| | A_{ds}^{m}C_{ds}T_{ds}Tₑₛ^{m}Cₑₛ^{m}CₑₛTₑₛTₑ | | | |
| 666904 | GalNAc₃-3_{a-o′}Gₑₛ^{m}CₑₛTₑₛTₑₛ^{m} | GalNAc₃- | PO | 2256 |
| | CₑₛA_{ds}G_{ds}T_{ds}^{m}C_{ds}A_{ds}T_{ds}G_{ds}A_{ds}^{m} | 3a | | |
| | C_{ds}T_{ds}Tₑₛ^{m}Cₑₛ^{m}CₑₛTₑₛTₑ | | | |
| 675441 | GalNAc₃-17_{a-o′}A_{do}Gₑₛ^{m}CₑₛTₑₛ | GalNAc₃- | A_{d} | 2258 |
| | Tₑₛ^{m}CₑₛA_{ds}G_{ds}T_{ds}^{m}C_{ds}A_{ds}T_{ds}G_{ds} | 17a | | |
| | A_{ds}^{m}C_{ds}T_{ds}Tₑₛ^{m}Cₑₛ^{m}CₑₛTₑₛTₑ | | | |
| 675442 | GalNAc₃-18_{a-o′}A_{do}Gₑₛ^{m}CₑₛTₑₛ | GalNAc₃- | A_{d} | 2258 |
| | Tₑₛ^{m}CₑₛA_{ds}G_{ds}T_{ds}^{m}C_{ds}A_{ds}T_{ds}G_{ds} | 18a | | |
| | A_{ds}^{m}C_{ds}T_{ds}Tₑₛ^{m}Cₑₛ^{m}CₑₛTₑₛTₑ | | | |

[0959] In all tables, capital letters indicate the nucleobase for each nucleoside and ^{m}C indicates a 5-methyl cytosine. Subscripts: “e” indicates a 2′-MOE modified nucleoside; “d” indicates a β-D-2′-deoxyribonucleoside; “s” indicates a phosphorothioate internucleoside linkage (PS); “o” indicates a phosphodiester internucleoside linkage (PO); and “o′” indicates —O—P(═O)(OH)—. Conjugate groups are in bold. The structure of GaNAC₃-3ₐ was shown previously in Example 39. The structure of GaNAC₃-17a was shown previously in Example 68, and the structure of GalNAc₃-18a was shown in Example 69.

### Treatment

[0960] Six to eight week old C57BL/6 mice (Jackson Laboratory, Bar Harbor, ME) were injected subcutaneously once at the dosage shown below with an oligonucleotide listed in Table 60 or with saline. Each treatment group consisted of 4 animals. The mice were sacrificed 72 hours following the final administration to determine the SRB-1 mRNA levels using real-time PCR and RIBOGREENW RNA quantification reagent (Molecular Probes, Inc. Eugene, OR) according to standard protocols. The results below are presented as the average percent of SRB-1 mRNA levels for each treatment group, normalized to the saline control.

[0961] As illustrated in Table 61, treatment with antisense oligonucleotides lowered SRB-1 mRNA levels in a dose-dependent manner. The antisense oligonucleotides comprising a GalNAc conjugate showed similar potencies and were significantly more potent than the parent oligonucleotide lacking a GalNAc conjugate.

TABLE 61
SRB-1 mRNA (% Saline)

| | Dosage | SRB-1 mRNA | GalNAc₃ | |
|---|---|---|---|---|
| ISIS No. | (mg/kg) | (% Saline) | Cluster | CM |
| Saline | n/a | 100.0 | n/a | n/a |
| 353382 | 3 | 79.38 | | |
| | 10 | 68.67 | n/a | n/a |
| | 30 | 40.70 | | |
| 661161 | 0.5 | 79.18 | GalNAc₃-3a | A_{d} |
| | 1.5 | 75.96 | | |
| | 5 | 30.53 | | |
| | 15 | 12.52 | | |
| 666904 | 0.5 | 91.30 | GalNAc₃-3a | PO |
| | 1.5 | 57.88 | | |
| | 5 | 21.22 | | |
| | 15 | 16.49 | | |
| 675441 | 0.5 | 76.71 | GalNAc₃-17a | A_{d} |
| | 1.5 | 63.63 | | |
| | 5 | 29.57 | | |
| | 15 | 13.49 | | |
| 675442 | 0.5 | 95.03 | GalNAc₃-18a | A_{d} |
| | 1.5 | 60.06 | | |
| | 5 | 31.04 | | |
| | 15 | 19.40 | | |

[0962] Liver transaminase levels, alanine aminotransferase (ALT) and aspartate aminotransferase (AST), in serum were measured relative to saline injected mice using standard protocols. Total bilirubin and BUN were also evaluated. The change in body weights was evaluated with no significant change from the saline group (data not shown). ALTs, ASTs, total bilirubin and BUN values are shown in Table 62 below.

TABLE 62

| | | | | Total | | | |
|---|---|---|---|---|---|---|---|
| | Dosage | | AST | Bilirubin | BUN | GalNAc₃ | |
| ISIS No. | (mg/kg) | ALT (U/L) | (U/L) | (mg/dL) | (mg/dL) | Cluster | CM |
| Saline | n/a | 26 | 59 | 0.16 | 42 | n/a | n/a |
| 353382 | 3 | 23 | 58 | 0.18 | 39 | n/a | n/a |
| | 10 | 28 | 58 | 0.16 | 43 | | |
| | 30 | 20 | 48 | 0.12 | 34 | | |
| 661161 | 0.5 | 30 | 47 | 0.13 | 35 | GalNAc₃-3a | A_{d} |
| | 1.5 | 23 | 53 | 0.14 | 37 | | |
| | 5 | 26 | 48 | 0.15 | 39 | | |
| | 15 | 32 | 57 | 0.15 | 42 | | |
| 666904 | 0.5 | 24 | 73 | 0.13 | 36 | GalNAc₃-3a | PO |
| | 1.5 | 21 | 48 | 0.12 | 32 | | |
| | 5 | 19 | 49 | 0.14 | 33 | | |
| | 15 | 20 | 52 | 0.15 | 26 | | |
| 675441 | 0.5 | 42 | 148 | 0.21 | 36 | GalNAc₃-17a | A_{d} |
| | 1.5 | 60 | 95 | 0.16 | 34 | | |
| | 5 | 27 | 75 | 0.14 | 37 | | |
| | 15 | 24 | 61 | 0.14 | 36 | | |
| 675442 | 0.5 | 26 | 65 | 0.15 | 37 | GalNAc₃-18a | A_{d} |
| | 1.5 | 25 | 64 | 0.15 | 43 | | |
| | 5 | 27 | 69 | 0.15 | 37 | | |
| | 15 | 30 | 84 | 0.14 | 37 | | |

### Example 75: Pharmacokinetic Analysis of Oligonucleotides Comprising a 5′-Conjugate Group

[0963] The PK of the ASOs in Tables 54, 57 and 60 above was evaluated using liver samples that were obtained following the treatment procedures described in Examples 65, 66, and 74. The liver samples were minced and extracted using standard protocols and analyzed by IP-HPLC-MS alongside an internal standard. The combined tissue level (g/g) of all metabolites was measured by integrating the appropriate UV peaks, and the tissue level of the full-length ASO missing the conjugate (“parent,” which is Isis No. 353382 in this case) was measured using the appropriate extracted ion chromatograms (EIC).

TABLE 63
PK Analysis in Liver

| | | Total Tissue | Parent ASO | | |
|---|---|---|---|---|---|
| | Dosage | Level by | Tissue Level | GalNAc₃ | |
| ISIS No. | (mg/kg) | UV (μg/g) | by EIC (μg/g) | Cluster | CM |
| 353382 | 3 | 8.9 | 8.6 | n/a | n/a |
| | 10 | 22.4 | 21.0 | | |
| | 30 | 54.2 | 44.2 | | |
| 661161 | 5 | 32.4 | 20.7 | GalNAc₃-3a | A_{d} |
| | 15 | 63.2 | 44.1 | | |
| 671144 | 5 | 20.5 | 19.2 | GalNAc₃-12a | A_{d} |
| | 15 | 48.6 | 41.5 | | |
| 670061 | 5 | 31.6 | 28.0 | GalNAc₃-13a | A_{d} |
| | 15 | 67.6 | 55.5 | | |
| 671261 | 5 | 19.8 | 16.8 | GalNAc₃-14a | A_{d} |
| | 15 | 64.7 | 49.1 | | |
| 671262 | 5 | 18.5 | 7.4 | GalNAc₃-15a | A_{d} |
| | 15 | 52.3 | 24.2 | | |
| 670699 | 5 | 16.4 | 10.4 | GalNAc₃-3a | T_{d} |
| | 15 | 31.5 | 22.5 | | |
| 670700 | 5 | 19.3 | 10.9 | GalNAc₃-3a | Aₑ |
| | 15 | 38.1 | 20.0 | | |
| 670701 | 5 | 21.8 | 8.8 | GalNAc₃-3a | Tₑ |
| | 15 | 35.2 | 16.1 | | |
| 671165 | 5 | 27.1 | 26.5 | GalNAc₃-13a | A_{d} |
| | 15 | 48.3 | 44.3 | | |
| 666904 | 5 | 30.8 | 24.0 | GalNAc₃-3a | PO |
| | 15 | 52.6 | 37.6 | | |
| 675441 | 5 | 25.4 | 19.0 | GalNAc₃-17a | A_{d} |
| | 15 | 54.2 | 42.1 | | |
| 675442 | 5 | 22.2 | 20.7 | GalNAc₃-18a | A_{d} |
| | 15 | 39.6 | 29.0 | | |

[0964] The results in Table 63 above show that there were greater liver tissue levels of the oligonucleotides comprising a GalNAc₃ conjugate group than of the parent oligonucleotide that does not comprise a GalNAc₃ conjugate group (ISIS 353382) 72 hours following oligonucleotide administration, particularly when taking into consideration the differences in dosing between the oligonucleotides with and without a GalNAc₃ conjugate group. Furthermore, by 72 hours, 40-98% of each oligonucleotide comprising a GalNAc₃ conjugate group was metabolized to the parent compound, indicating that the GalNAc₃ conjugate groups were cleaved from the oligonucleotides.

### Example 76: Preparation of Oligomeric Compound 230 Comprising GalNAc₃-23

[chemical structure]

[chemical structure]

[0965] Compound 222 is commercially available. 44.48 ml (0.33 mol) of compound 222 was treated with tosyl chloride (25.39 g, 0.13 mol) in pyridine (500 mL) for 16 hours. The reaction was then evaporated to an oil, dissolved in EtOAc and washed with water, sat. NaHCO₃, brine, and dried over Na₂SO₄. The ethyl acetate was concentrated to dryness and purified by column chromatography, eluted with EtOAc/hexanes (1:1) followed by 10% methanol in CH₂Cl₂ to give compound 223 as a colorless oil. LCMS and NMR were consistent with the structure. 10 g (32.86 mmol) of 1-Tosyltriethylene glycol (compound 223) was treated with sodium azide (10.68 g, 164.28 mmol) in DMSO (100 mL) at room temperature for 17 hours. The reaction mixture was then poured onto water, and extracted with EtOAc. The organic layer was washed with water three times and dried over Na₂SO₄. The organic layer was concentrated to dryness to give 5.3 g of compound 224 (92%). LCMS and NMR were consistent with the structure. 1-Azidotriethylene glycol (compound 224, 5.53 g, 23.69 mmol) and compound 4 (6 g, 18.22 mmol) were treated with 4 A molecular sieves (5 g), and TMSOTf (1.65 ml, 9.11 mmol) in dichloromethane (100 mL) under an inert atmosphere. After 14 hours, the reaction was filtered to remove the sieves, and the organic layer was washed with sat. NaHCO₃, water, brine, and dried over Na₂SO₄. The organic layer was concentrated to dryness and purified by column chromatography, eluted with a gradient of 2 to 4% methanol in dichloromethane to give compound 225. LCMS and NMR were consistent with the structure. Compound 225 (11.9 g, 23.59 mmol) was hydrogenated in EtOAc/Methanol (4:1, 250 mL) over Pearlman's catalyst. After 8 hours, the catalyst was removed by filtration and the solvents removed to dryness to give compound 226. LCMS and NMR were consistent with the structure.

[0966] In order to generate compound 227, a solution of nitromethanetrispropionic acid (4.17 g, 15.04 mmol) and Hunig's base (10.3 ml, 60.17 mmol) in DMF (100 mL) were treated dropwise with pentaflourotrifluoro acetate (9.05 ml, 52.65 mmol). After 30 minutes, the reaction was poured onto ice water and extracted with EtOAc. The organic layer was washed with water, brine, and dried over Na₂SO₄. The organic layer was concentrated to dryness and then recrystallized from heptane to give compound 227 as a white solid. LCMS and NMR were consistent with the structure. Compound 227 (1.5 g, 1.93 mmol) and compound 226 (3.7 g, 7.74 mmol) were stirred at room temperature in acetonitrile (15 mL) for 2 hours. The reaction was then evaporated to dryness and purified by column chromatography, eluting with a gradient of 2 to 10% methanol in dichloromethane to give compound 228. LCMS and NMR were consistent with the structure. Compound 228 (1.7 g, 1.02 mmol) was treated with Raney Nickel (about 2 g wet) in ethanol (100 mL) in an atmosphere of hydrogen. After 12 hours, the catalyst was removed by filtration and the organic layer was evaporated to a solid that was used directly in the next step. LCMS and NMR were consistent with the structure. This solid (0.87 g, 0.53 mmol) was treated with benzylglutaric acid (0.18 g, 0.8 mmol), HBTU (0.3 g, 0.8 mmol) and DIEA (273.7 μl, 1.6 mmol) in DMF (5 mL). After 16 hours, the DMF was removed under reduced pressure at 65° C. to an oil, and the oil was dissolved in dichloromethane. The organic layer was washed with sat. NaHCO₃, brine, and dried over Na₂SO₄. After evaporation of the organic layer, the compound was purified by column chromatography and eluted with a gradient of 2 to 20% methanol in dichloromethane to give the coupled product. LCMS and NMR were consistent with the structure. The benzyl ester was deprotected with Pearlman's catalyst under a hydrogen atmosphere for 1 hour. The catalyst was them removed by filtration and the solvents removed to dryness to give the acid. LCMS and NMR were consistent with the structure. The acid (486 mg, 0.27 mmol) was dissolved in dry DMF (3 mL). Pyridine (53.61 μl, 0.66 mmol) was added and the reaction was purged with argon. Pentaflourotriflouro acetate (46.39 μl, 0.4 mmol) was slowly added to the reaction mixture. The color of the reaction changed from pale yellow to burgundy, and gave off a light smoke which was blown away with a stream of argon. The reaction was allowed to stir at room temperature for one hour (completion of reaction was confirmed by LCMS). The solvent was removed under reduced pressure (rotovap) at 70° C. The residue was diluted with DCM and washed with 1N NaHSO₄, brine, saturated sodium bicarbonate and brine again. The organics were dried over Na₂SO₄, filtered, and were concentrated to dryness to give 225 mg of compound 229 as a brittle yellow foam. LCMS and NMR were consistent with the structure.

[0967] Oligomeric compound 230, comprising a GalNAc₃-23 conjugate group, was prepared from compound 229 using the general procedure illustrated in Example 46. The GalNAc₃ cluster portion of the GalNAc₃-23 conjugate group (GalNAc₃-23ₐ) can be combined with any cleavable moiety to provide a variety of conjugate groups. The structure of GalNAc₃-23 (GalNAc₃-23ₐ-CM) is shown below:

[chemical structure]

### Example 77: Antisense Inhibition In Vivo by Oligonucleotides Targeting SRB-1 Comprising a GalNAc₃ Conjugate

[0968] The oligonucleotides listed below were tested in a dose-dependent study for antisense inhibition of SRB-1 in mice.

TABLE 64
Modified ASOs targeting SRB-1

| | | | | SEQ |
|---|---|---|---|---|
| ISIS | | GalNAc₃ | | ID |
| No. | Sequence (5′ to 3′) | Cluster | CM | No. |
| 661161 | GalNAc₃-3_{a-o′}A_{do}Gₑₛ^{m}CₑₛTₑₛ | GalNAc₃- | A_{d} | 2258 |
| | Tₑₛ^{m}CₑₛA_{ds}G_{ds}T_{ds}^{m}C_{ds}A_{ds}T_{ds} | 3a | | |
| | G_{ds}A_{ds}^{m}C_{ds}T_{ds}Tₑₛ^{m}Cₑₛ^{m}CₑₛTₑₛTₑ | | | |
| 666904 | GalNAc₃-3_{a-o′}Gₑₛ^{m}CₑₛTₑₛTₑₛ^{m} | GalNAc₃- | PO | 2256 |
| | CₑₛA_{ds}G_{ds}T_{ds}^{m}C_{ds}A_{ds}T_{ds}G_{ds}A_{ds}^{m} | 3a | | |
| | C_{ds}T_{ds}Tₑₛ^{m}Cₑₛ^{m}CₑₛTₑₛTₑ | | | |
| 673502 | GalNAc₃-10_{a-o′}A_{do}Gₑₛ^{m}CₑₒTₑₒ | GalNAc₃- | A_{d} | 2258 |
| | Tₑₒ^{m}CₑₒA_{ds}G_{ds}T_{ds}^{m}C_{ds}A_{ds}T_{ds}G_{ds} | 10a | | |
| | A_{ds}^{m}C_{ds}T_{ds}Tₑₒ^{m}Cₑₒ^{m}CₑₛTₑₛTₑ | | | |
| 677844 | GalNAc₃-9_{a-o′}A_{do}Gₑₛ^{m}CₑₒTₑₒ | GalNAc₃- | A_{d} | 2258 |
| | Tₑₒ^{m}CₑₒA_{ds}G_{ds}T_{ds}^{m}C_{ds}A_{ds}T_{ds}G_{ds} | 9a | | |
| | A_{ds}^{m}C_{ds}T_{ds}Tₑₒ^{m}Cₑₒ^{m}CₑₛTₑₛTₑ | | | |
| 677843 | GalNAc₃-23_{a-o′}A_{do}Gₑₛ^{m}CₑₛTₑₛ | GalNAc₃- | A_{d} | 2258 |
| | Tₑₛ^{m}CₑₛA_{ds}G_{ds}T_{ds}^{m}C_{ds}A_{ds}T_{ds}G_{ds} | 23a | | |
| | A_{ds}^{m}C_{ds}T_{ds}Tₑₛ^{m}Cₑₛ^{m}CₑₛTₑₛTₑ | | | |
| 655861 | Gₑₛ^{m}CₑₛTₑₛTₑₛ^{m}CₑₛA_{ds}G_{ds}T_{ds}^{m} | GalNAc₃- | A_{d} | 2257 |
| | C_{ds}A_{ds}T_{ds}G_{ds}A_{ds}^{m}C_{ds}T_{ds}Tₑₛ^{m} | 1a | | |
| | Cₑₛ^{m}CₑₛTₑₛTₑₒA_{do′}-GalNAc₃- | | | |
| | 1ₐ | | | |
| 677841 | Gₑₛ^{m}CₑₛTₑₛTₑₛ^{m}CₑₛA_{ds}G_{ds}T_{ds}^{m} | GalNAc₃- | A_{d} | 2257 |
| | C_{ds}A_{ds}T_{ds}G_{ds}A_{ds}^{m}C_{ds}T_{ds}Tₑₛ^{m} | 19a | | |
| | Cₑₛ^{m}CₑₛTₑₛTₑₒA_{do′}-GalNAc₃- | | | |
| | 19ₐ | | | |
| 677842 | Gₑₛ^{m}CₑₛTₑₛTₑₛ^{m}CₑₛA_{ds}G_{ds}T_{ds}^{m} | GalNAc₃- | A_{d} | 2257 |
| | C_{ds}A_{ds}T_{ds}G_{ds}A_{ds}^{m}C_{ds}T_{ds}Tₑₛ^{m} | 20a | | |
| | Cₑₛ^{m}CₑₛTₑₛTₑₒA_{do′}-GalNAc₃- | | | |
| | 20ₐ | | | |

[0969] The structure of GalNAc3-1, was shown previously in Example 9, GalNAc3-3, was shown in Example 39, GalNAc3-9a was shown in Example 52, GalNAc3-10a was shown in Example 46, GalNAc3-19, was shown in Example 70, GalNAc3-20, was shown in Example 71, and GalNAc3-23, was shown in Example 76.

### Treatment

[0970] Six to eight week old C57BL/6 mice (Jackson Laboratory, Bar Harbor, ME) were each injected subcutaneously once at a dosage shown below with an oligonucleotide listed in Table 64 or with saline. Each treatment group consisted of 4 animals. The mice were sacrificed 72 hours following the final administration to determine the SRB-1 mRNA levels using real-time PCR and RIBOGREEN® RNA quantification reagent (Molecular Probes, Inc. Eugene, OR) according to standard protocols. The results below are presented as the average percent of SRB-1 mRNA levels for each treatment group, normalized to the saline control.

[0971] As illustrated in Table 65, treatment with antisense oligonucleotides lowered SRB-1 mRNA levels in a dose-dependent manner.

TABLE 65
SRB-1 mRNA (% Saline)

| | Dosage | SRB-1 mRNA | GalNAc₃ | |
|---|---|---|---|---|
| ISIS No. | (mg/kg) | (% Saline) | Cluster | CM |
| Saline | n/a | 100.0 | n/a | n/a |
| 661161 | 0.5 | 89.18 | GalNAc₃-3a | A_{d} |
| | 1.5 | 77.02 | | |
| | 5 | 29.10 | | |
| | 15 | 12.64 | | |
| 666904 | 0.5 | 93.11 | GalNAc₃-3a | PO |
| | 1.5 | 55.85 | | |
| | 5 | 21.29 | | |
| | 15 | 13.43 | | |
| 673502 | 0.5 | 77.75 | GalNAc₃-10a | A_{d} |
| | 1.5 | 41.05 | | |
| | 5 | 19.27 | | |
| | 15 | 14.41 | | |
| 677844 | 0.5 | 87.65 | GalNAc₃-9a | A_{d} |
| | 1.5 | 93.04 | | |
| | 5 | 40.77 | | |
| | 15 | 16.95 | | |
| 677843 | 0.5 | 102.28 | GalNAc₃-23a | A_{d} |
| | 1.5 | 70.51 | | |
| | 5 | 30.68 | | |
| | 15 | 13.26 | | |
| 655861 | 0.5 | 79.72 | GalNAc₃-1a | A_{d} |
| | 1.5 | 55.48 | | |
| | 5 | 26.99 | | |
| | 15 | 17.58 | | |
| 677841 | 0.5 | 67.43 | GalNAc₃-19a | A_{d} |
| | 1.5 | 45.13 | | |
| | 5 | 27.02 | | |
| | 15 | 12.41 | | |
| 677842 | 0.5 | 64.13 | GalNAc₃-20a | A_{d} |
| | 1.5 | 53.56 | | |
| | 5 | 20.47 | | |
| | 15 | 10.23 | | |

[0972] Liver transaminase levels, alanine aminotransferase (ALT) and aspartate aminotransferase (AST), in serum were also measured using standard protocols. Total bilirubin and BUN were also evaluated. Changes in body weights were evaluated, with no significant change from the saline group (data not shown). ALTs, ASTs, total bilirubin and BUN values are shown in Table 66 below.

TABLE 66

| | | | | Total | | | |
|---|---|---|---|---|---|---|---|
| | Dosage | | AST | Bilirubin | BUN | GalNAc₃ | |
| ISIS No. | (mg/kg) | ALT (U/L) | (U/L) | (mg/dL) | (mg/dL) | Cluster | CM |
| Saline | n/a | 21 | 45 | 0.13 | 34 | n/a | n/a |
| 661161 | 0.5 | 28 | 51 | 0.14 | 39 | GalNAc₃-3a | A_{d} |
| | 1.5 | 23 | 42 | 0.13 | 39 | | |
| | 5 | 22 | 59 | 0.13 | 37 | | |
| | 15 | 21 | 56 | 0.15 | 35 | | |
| 666904 | 0.5 | 24 | 56 | 0.14 | 37 | GalNAc₃-3a | PO |
| | 1.5 | 26 | 68 | 0.15 | 35 | | |
| | 5 | 23 | 77 | 0.14 | 34 | | |
| | 15 | 24 | 60 | 0.13 | 35 | | |
| 673502 | 0.5 | 24 | 59 | 0.16 | 34 | GalNAc₃-10a | A_{d} |
| | 1.5 | 20 | 46 | 0.17 | 32 | | |
| | 5 | 24 | 45 | 0.12 | 31 | | |
| | 15 | 24 | 47 | 0.13 | 34 | | |
| 677844 | 0.5 | 25 | 61 | 0.14 | 37 | GalNAc₃-9a | A_{d} |
| | 1.5 | 23 | 64 | 0.17 | 33 | | |
| | 5 | 25 | 58 | 0.13 | 35 | | |
| | 15 | 22 | 65 | 0.14 | 34 | | |
| 677843 | 0.5 | 53 | 53 | 0.13 | 35 | GalNAc₃-23a | A_{d} |
| | 1.5 | 25 | 54 | 0.13 | 34 | | |
| | 5 | 21 | 60 | 0.15 | 34 | | |
| | 15 | 22 | 43 | 0.12 | 38 | | |
| 655861 | 0.5 | 21 | 48 | 0.15 | 33 | GalNAc₃-1a | A_{d} |
| | 1.5 | 28 | 54 | 0.12 | 35 | | |
| | 5 | 22 | 60 | 0.13 | 36 | | |
| | 15 | 21 | 55 | 0.17 | 30 | | |
| 677841 | 0.5 | 32 | 54 | 0.13 | 34 | GalNAc₃-19a | A_{d} |
| | 1.5 | 24 | 56 | 0.14 | 34 | | |
| | 5 | 23 | 92 | 0.18 | 31 | | |
| | 15 | 24 | 58 | 0.15 | 31 | | |
| 677842 | 0.5 | 23 | 61 | 0.15 | 35 | GalNAc₃-20a | A_{d} |
| | 1.5 | 24 | 57 | 0.14 | 34 | | |
| | 5 | 41 | 62 | 0.15 | 35 | | |
| | 15 | 24 | 37 | 0.14 | 32 | | |

### Example 78: Antisense inhibition in vivo by oligonucleotides targeting Angiotensinogen comprising a GalNAc₃ conjugate

[0973] The oligonucleotides listed below were tested in a dose-dependent study for antisense inhibition of Angiotensinogen (AGT) in normotensive Sprague Dawley rats.

TABLE 67
Modified ASOs targeting SRB-1

| | | | | SEQ |
|---|---|---|---|---|
| ISIS | | GalNAc₃ | | ID |
| No. | Sequence (5′ to 3′) | Cluster | CM | No. |
| 552668 | ^{m}CₑₛAₑₛ^{m}CₑₛTₑₛGₑₛA_{ds}T_{ds}T_{ds}T_{ds} | n/a | n/a | 2262 |
| | T_{ds}T_{ds}G_{ds}^{m}C_{ds}^{m}C_{ds}^{m}C_{ds}AₑₛGₑₛGₑₛ | | | |
| | AₑₛTₑ | | | |
| 669509 | ^{m}CₑₛAₑₛ^{m}CₑₛTₑₛGₑₛA_{ds}T_{ds}T_{ds}T_{ds} | GalNAc₃- | A_{d} | 2263 |
| | T_{ds}T_{ds}G_{ds}^{m}C_{ds}^{m}C_{ds}^{m}C_{ds}AₑₛGₑₛGₑₛ | 1a | | |
| | AₑₛTₑₒA_{do′}-GalNAc₃-1ₐ | | | |

[0974] The structure of GalNAc₃-1ₐ was shown previously in Example 9.

### Treatment

[0975] Six week old, male Sprague Dawley rats were each injected subcutaneously once per week at a dosage shown below, for a total of three doses, with an oligonucleotide listed in Table 67 or with PBS. Each treatment group consisted of 4 animals. The rats were sacrificed 72 hours following the final dose. AGT liver mRNA levels were measured using real-time PCR and RIBOGREEN® RNA quantification reagent (Molecular Probes, Inc. Eugene, OR) according to standard protocols. AGT plasma protein levels were measured using the Total Angiotensinogen ELISA (Catalog #JP27412, IBL International, Toronto, ON) with plasma diluted 1:20,000. The results below are presented as the average percent of AGT mRNA levels in liver or AGT protein levels in plasma for each treatment group, normalized to the PBS control.

[0976] As illustrated in Table 68, treatment with antisense oligonucleotides lowered AGT liver mRNA and plasma protein levels in a dose-dependent manner, and the oligonucleotide comprising a GalNAc conjugate was significantly more potent than the parent oligonucleotide lacking a GalNAc conjugate.

TABLE 68
AGT liver mRNA and plasma protein levels

| | | AGT liver | AGT plasma | | |
|---|---|---|---|---|---|
| ISIS | Dosage | mRNA | protein | GalNAc₃ | |
| No. | (mg/kg) | (% PBS) | (% PBS) | Cluster | CM |
| PBS | n/a | 100 | 100 | n/a | n/a |
| 552668 | 3 | 95 | 122 | n/a | n/a |
| | 10 | 85 | 97 | | |
| | 30 | 46 | 79 | | |
| | 90 | 8 | 11 | | |
| 669509 | 0.3 | 95 | 70 | GalNAc₃-1a | A_{d} |
| | 1 | 95 | 129 | | |
| | 3 | 62 | 97 | | |
| | 10 | 9 | 23 | | |

[0977] Liver transaminase levels, alanine aminotransferase (ALT) and aspartate aminotransferase (AST), in plasma and body weights were also measured at time of sacrifice using standard protocols. The results are shown in Table 69 below.

TABLE 69
Liver transaminase levels and rat body weights

| | | | | Body | | |
|---|---|---|---|---|---|---|
| | Dosage | ALT | AST | Weight (% | GalNAc₃ | |
| ISIS No. | (mg/kg) | (U/L) | (U/L) | of baseline) | Cluster | CM |
| PBS | n/a | 51 | 81 | 186 | n/a | n/a |
| 552668 | 3 | 54 | 93 | 183 | n/a | n/a |
| | 10 | 51 | 93 | 194 | | |
| | 30 | 59 | 99 | 182 | | |
| | 90 | 56 | 78 | 170 | | |
| 669509 | 0.3 | 53 | 90 | 190 | GalNAc₃-1a | A_{d} |
| | 1 | 51 | 93 | 192 | | |
| | 3 | 48 | 85 | 189 | | |
| | 10 | 56 | 95 | 189 | | |

### Example 79: Duration of Action In Vivo of Oligonucleotides Targeting APOC-III Comprising a GalNAc₃ Conjugate

[0978] The oligonucleotides listed in Table 70 below were tested in a single dose study for duration of action in mice.

TABLE 70
Modified ASOs targeting APOC-III

| | | | | SEQ |
|---|---|---|---|---|
| ISIS | | GalNAc₃ | | ID |
| No. | Sequence (5′ to 3′) | Cluster | CM | No. |
| 304801 | AₑₛGₑₛ^{m}CₑₛTₑₛTₑₛ^{m}C_{ds}T_{ds}T_{ds}G_{ds} | n/a | n/a | 2248 |
| | T_{ds}^{m}C_{ds}^{m}C_{ds}A_{ds}G_{ds}^{m}C_{ds}TₑₛTₑₛTₑₛ | | | |
| | AₑₛTₑ | | | |
| 647535 | AₑₛGₑₛ^{m}CₑₛTₑₛTₑₛ^{m}C_{ds}T_{ds}T_{ds}G_{ds} | GalNAc₃- | A_{d} | 2249 |
| | T_{ds}^{m}C_{ds}^{m}C_{ds}A_{ds}G_{ds}^{m}C_{ds}TₑₛTₑₛTₑₛ | 1a | | |
| | AₑₛTₑₒA_{do′}-GalNAc₃-1ₐ | | | |
| 663083 | GalNAc₃-3_{a-o′}A_{do}Gₑₛ^{m}CₑₒTₑₒ | GalNAc₃- | A_{d} | 2264 |
| | Tₑₒ^{m}CₑₒA_{ds}G_{ds}T_{ds}^{m}C_{ds}A_{ds}T_{ds}G_{ds} | 3a | | |
| | A_{ds}^{m}C_{ds}T_{ds}Tₑₒ^{m}Cₑₒ^{m}CₑₛTₑₛTₑ | | | |
| 674449 | GalNAc₃-7_{a-o′}A_{do}Gₑₛ^{m}CₑₒTₑₒ | GalNAc₃- | A_{d} | 2264 |
| | Tₑₒ^{m}CₑₒA_{ds}G_{ds}T_{ds}^{m}C_{ds}A_{ds}T_{ds}G_{ds} | 7a | | |
| | A_{ds}^{m}C_{ds}T_{ds}Tₑₒ^{m}Cₑₒ^{m}CₑₛTₑₛTₑ | | | |
| 674450 | GalNAc₃-10_{a-o′}A_{do}Gₑₛ^{m}CₑₛTₑₛ | GalNAc₃- | A_{d} | 2264 |
| | Tₑₛ^{m}CₑₛA_{ds}G_{ds}T_{ds}^{m}C_{ds}A_{ds}T_{ds}G_{ds} | 10a | | |
| | A_{ds}^{m}C_{ds}T_{ds}Tₑₛ^{m}Cₑₛ^{m}CₑₛTₑₛTₑ | | | |
| 674451 | GalNAc₃-13_{a-o′}A_{do}Gₑₛ^{m}CₑₛTₑₛ | GalNAc₃- | A_{d} | 2264 |
| | Tₑₛ^{m}CₑₛA_{ds}G_{ds}T_{ds}^{m}C_{ds}A_{ds}T_{ds}G_{ds} | 13a | | |
| | A_{ds}^{m}C_{ds}T_{ds}Tₑₛ^{m}Cₑₛ^{m}CₑₛTₑₛTₑ | | | |

[0979] The structure of GalNAc₃-1ₐ was shown previously in Example 9, GalNAc₃-3ₐ was shown in Example 39, GalNAc₃-7ₐ was shown in Example 48, GalNAc₃-10ₐ was shown in Example 46, and GalNAc₃-13ₐ was shown in Example 62.

### Treatment

[0980] Six to eight week old transgenic mice that express human APOC-III were each injected subcutaneously once with an oligonucleotide listed in Table 70 or with PBS. Each treatment group consisted of 3 animals. Blood was drawn before dosing to determine baseline and at 72 hours, 1 week, 2 weeks, 3 weeks, 4 weeks, 5 weeks, and 6 weeks following the dose. Plasma triglyceride and APOC-III protein levels were measured as described in Example 20. The results below are presented as the average percent of plasma triglyceride and APOC-II levels for each treatment group, normalized to baseline levels, showing that the oligonucleotides comprising a GalNAc conjugate group exhibited a longer duration of action than the parent oligonucleotide without a conjugate group (ISIS 304801) even though the dosage of the parent was three times the dosage of the oligonucleotides comprising a GalNAc conjugate group.

TABLE 71
Plasma triglyceride and APOC-III protein levels in transgenic mice

| | | Time | | | | |
|---|---|---|---|---|---|---|
| | | point | Triglyc- | APOC-III | | |
| | | (days | erides | protein | | |
| ISIS | Dosage | post- | (% | (% | GalNAc₃ | |
| No. | (mg/kg) | dose) | baseline) | baseline) | Cluster | CM |
| PBS | n/a | 3 | 97 | 102 | n/a | n/a |
| | | 7 | 101 | 98 | | |
| | | 14 | 108 | 98 | | |
| | | 21 | 107 | 107 | | |
| | | 28 | 94 | 91 | | |
| | | 35 | 88 | 90 | | |
| | | 42 | 91 | 105 | | |
| 304801 | 30 | 3 | 40 | 34 | n/a | n/a |
| | | 7 | 41 | 37 | | |
| | | 14 | 50 | 57 | | |
| | | 21 | 50 | 50 | | |
| | | 28 | 57 | 73 | | |
| | | 35 | 68 | 70 | | |
| | | 42 | 75 | 93 | | |
| 647535 | 10 | 3 | 36 | 37 | GalNAc₃-1a | A_{d} |
| | | 7 | 39 | 47 | | |
| | | 14 | 40 | 45 | | |
| | | 21 | 41 | 41 | | |
| | | 28 | 42 | 62 | | |
| | | 35 | 69 | 69 | | |
| | | 42 | 85 | 102 | | |
| 663083 | 10 | 3 | 24 | 18 | GalNAc₃-3a | A_{d} |
| | | 7 | 28 | 23 | | |
| | | 14 | 25 | 27 | | |
| | | 21 | 28 | 28 | | |
| | | 28 | 37 | 44 | | |
| | | 35 | 55 | 57 | | |
| | | 42 | 60 | 78 | | |
| 674449 | 10 | 3 | 29 | 26 | GalNAc₃-7a | A_{d} |
| | | 7 | 32 | 31 | | |
| | | 14 | 38 | 41 | | |
| | | 21 | 44 | 44 | | |
| | | 28 | 53 | 63 | | |
| | | 35 | 69 | 77 | | |
| | | 42 | 78 | 99 | | |
| 674450 | 10 | 3 | 33 | 30 | GalNAc₃-10a | A_{d} |
| | | 7 | 35 | 34 | | |
| | | 14 | 31 | 34 | | |
| | | 21 | 44 | 44 | | |
| | | 28 | 56 | 61 | | |
| | | 35 | 68 | 70 | | |
| | | 42 | 83 | 95 | | |
| 674451 | 10 | 3 | 35 | 33 | GalNAc₃-13a | A_{d} |
| | | 7 | 24 | 32 | | |
| | | 14 | 40 | 34 | | |
| | | 21 | 48 | 48 | | |
| | | 28 | 54 | 67 | | |
| | | 35 | 65 | 75 | | |
| | | 42 | 74 | 97 | | |

### Example 80: Antisense Inhibition In Vivo by Oligonucleotides Targeting Alpha-1 Antitrypsin (A1AT) comprising a GalNAc₃ Conjugate

[0981] The oligonucleotides listed in Table 72 below were tested in a study for dose-dependent inhibition of A1AT in mice.

TABLE 72
Modified ASOs targeting A1AT

| | | | | SEQ |
|---|---|---|---|---|
| ISIS | | GalNAc₃ | | ID |
| No. | Sequence (5′ to 3′) | Cluster | CM | No. |
| 476366 | Aₑₛ^{m}Cₑₛ^{m}Cₑₛ^{m}CₑₛAₑₛA_{ds}T_{ds}T_{ds}^{m} | n/a | n/a | 2265 |
| | C_{ds}A_{ds}G_{ds}A_{ds}A_{ds}G_{ds}G_{ds}AₑₛAₑₛ | | | |
| | GₑₛGₑₛAₑ | | | |
| 656326 | Aₑₛ^{m}Cₑₛ^{m}Cₑₛ^{m}CₑₛAₑₛA_{ds}T_{ds}T_{ds}^{m} | GalNAc₃- | A_{d} | 2266 |
| | C_{ds}A_{ds}G_{ds}A_{ds}A_{ds}G_{ds}G_{ds}AₑₛAₑₛ | 1a | | |
| | GₑₛGₑₛAₑₒA_{do′}-GalNAc₃-1ₐ | | | |
| 678381 | GalNAc₃-3_{a-o′}A_{do′}Aₑₛ^{m}Cₑₛ^{m} | GalNAc₃- | A_{d} | 2267 |
| | Cₑₛ^{m}CₑₛAₑₛA_{ds}T_{ds}T_{ds}^{m}C_{ds}A_{ds}G_{ds} | 3a | | |
| | A_{ds}A_{ds}G_{ds}G_{ds}AₑₛAₑₛGₑₛGₑₛAₑ | | | |
| 678382 | GalNAc₃-7_{a-o′}A_{do′}Aₑₛ^{m}Cₑₛ^{m} | GalNAc₃- | A_{d} | 2267 |
| | Cₑₛ^{m}CₑₛAₑₛA_{ds}T_{ds}T_{ds}^{m}C_{ds}A_{ds}G_{ds} | 7a | | |
| | A_{ds}A_{ds}G_{ds}G_{ds}AₑₛAₑₛGₑₛGₑₛAₑ | | | |
| 378383 | GalNAc₃-10_{a-o′}A_{do′}Aₑₛ^{m}Cₑₛ^{m} | GalNAc₃- | A_{d} | 2267 |
| | Cₑₛ^{m}CₑₛAₑₛA_{ds}T_{ds}T_{ds}^{m}C_{ds}A_{ds}G_{ds} | 10a | | |
| | A_{ds}A_{ds}G_{ds}G_{ds}AₑₛAₑₛGₑₛGₑₛAₑ | | | |
| 678384 | GalNAc₃-13_{a-o′}A_{do′}Aₑₛ^{m} | GalNAc₃- | A_{d} | 2267 |
| | Cₑₛ^{m}Cₑₛ^{m}CₑₛAₑₛA_{ds}T_{ds}T_{ds}^{m}C_{ds}A_{ds} | 13a | | |
| | G_{ds}A_{ds}A_{ds}G_{ds}G_{ds}AₑₛAₑₛGₑₛGₑₛAₑ | | | |

[0982] The structure of GalNAc₃-1ₐ was shown previously in Example 9, GalNAc₃-3ₐ was shown in Example 39, GalNAc₃-7ₐ was shown in Example 48, GalNAc₃-10ₐ was shown in Example 46, and GalNAc₃-13ₐ was shown in Example 62.

### Treatment

[0983] Six week old, male C57BL/6 mice (Jackson Laboratory, Bar Harbor, ME) were each injected subcutaneously once per week at a dosage shown below, for a total of three doses, with an oligonucleotide listed in Table 72 or with PBS. Each treatment group consisted of 4 animals. The mice were sacrificed 72 hours following the final administration. A1AT liver mRNA levels were determined using real-time PCR and RIBOGREEN® RNA quantification reagent (Molecular Probes, Inc. Eugene, OR) according to standard protocols. A1AT plasma protein levels were determined using the Mouse Alpha 1-Antitrypsin ELISA (catalog #41-A1AMS-E01, Alpco, Salem, NH). The results below are presented as the average percent of A1AT liver mRNA and plasma protein levels for each treatment group, normalized to the PBS control.

[0984] As illustrated in Table 73, treatment with antisense oligonucleotides lowered A1AT liver mRNA and A1AT plasma protein levels in a dose-dependent manner. The oligonucleotides comprising a GalNAc conjugate were significantly more potent than the parent (ISIS 476366).

TABLE 73
A1AT liver mRNA and plasma protein levels

| | | A1AT liver | A1AT plasma | | |
|---|---|---|---|---|---|
| ISIS | Dosage | mRNA | protein | GalNAc₃ | |
| No. | (mg/kg) | (% PBS) | (% PBS) | Cluster | CM |
| PBS | n/a | 100 | 100 | n/a | n/a |
| 476366 | 5 | 86 | 78 | n/a | n/a |
| | 15 | 73 | 61 | | |
| | 45 | 30 | 38 | | |
| 656326 | 0.6 | 99 | 90 | GalNAc₃-1a | A_{d} |
| | 2 | 61 | 70 | | |
| | 6 | 15 | 30 | | |
| | 18 | 6 | 10 | | |
| 678381 | 0.6 | 105 | 90 | GalNAc₃-3a | A_{d} |
| | 2 | 53 | 60 | | |
| | 6 | 16 | 20 | | |
| | 18 | 7 | 13 | | |
| 678382 | 0.6 | 90 | 79 | GalNAc₃-7a | A_{d} |
| | 2 | 49 | 57 | | |
| | 6 | 21 | 27 | | |
| | 18 | 8 | 11 | | |
| 678383 | 0.6 | 94 | 84 | GalNAc₃-10a | A_{d} |
| | 2 | 44 | 53 | | |
| | 6 | 13 | 24 | | |
| | 18 | 6 | 10 | | |
| 678384 | 0.6 | 106 | 91 | GalNAc₃-13a | A_{d} |
| | 2 | 65 | 59 | | |
| | 6 | 26 | 31 | | |
| | 18 | 11 | 15 | | |

[0985] Liver transaminase and BUN levels in plasma were measured at time of sacrifice using standard protocols. Body weights and organ weights were also measured. The results are shown in Table 74 below. Body weight is shown as % relative to baseline. Organ weights are shown as % of body weight relative to the PBS control group.

TABLE 74

| ISIS | Dosage | ALT | AST | BUN | Body weight | Liver weight | Kidney weight | Spleen weight |
|---|---|---|---|---|---|---|---|---|
| No. | (mg/kg) | (U/L) | (U/L) | (mg/dL) | (% baseline) | (Rel % BW) | (Rel % BW) | (Rel % BW) |
| PBS | n/a | 25 | 51 | 37 | 119 | 100 | 100 | 100 |
| 476366 | 5 | 34 | 68 | 35 | 116 | 91 | 98 | 106 |
| | 15 | 37 | 74 | 30 | 122 | 92 | 101 | 128 |
| | 45 | 30 | 47 | 31 | 118 | 99 | 108 | 123 |
| 656326 | 0.6 | 29 | 57 | 40 | 123 | 100 | 103 | 119 |
| | 2 | 36 | 75 | 39 | 114 | 98 | 111 | 106 |
| | 6 | 32 | 67 | 39 | 125 | 99 | 97 | 122 |
| | 18 | 46 | 77 | 36 | 116 | 102 | 109 | 101 |
| 678381 | 0.6 | 26 | 57 | 32 | 117 | 93 | 109 | 110 |
| | 2 | 26 | 52 | 33 | 121 | 96 | 106 | 125 |
| | 6 | 40 | 78 | 32 | 124 | 92 | 106 | 126 |
| | 18 | 31 | 54 | 28 | 118 | 94 | 103 | 120 |
| 678382 | 0.6 | 26 | 42 | 35 | 114 | 100 | 103 | 103 |
| | 2 | 25 | 50 | 31 | 117 | 91 | 104 | 117 |
| | 6 | 30 | 79 | 29 | 117 | 89 | 102 | 107 |
| | 18 | 65 | 112 | 31 | 120 | 89 | 104 | 113 |
| 678383 | 0.6 | 30 | 67 | 38 | 121 | 91 | 100 | 123 |
| | 2 | 33 | 53 | 33 | 118 | 98 | 102 | 121 |
| | 6 | 32 | 63 | 32 | 117 | 97 | 105 | 105 |
| | 18 | 36 | 68 | 31 | 118 | 99 | 103 | 108 |
| 678384 | 0.6 | 36 | 63 | 31 | 118 | 98 | 103 | 98 |
| | 2 | 32 | 61 | 32 | 119 | 93 | 102 | 114 |
| | 6 | 34 | 69 | 34 | 122 | 100 | 100 | 96 |
| | 18 | 28 | 54 | 30 | 117 | 98 | 101 | 104 |

### Example 81: Duration of Action In Vivo of Oligonucleotides Targeting A1AT Comprising a GalNAc₃ Cluster

[0986] The oligonucleotides listed in Table 72 were tested in a single dose study for duration of action in mice.

### Treatment

[0987] Six week old, male C57BL/6 mice were each injected subcutaneously once with an oligonucleotide listed in Table 72 or with PBS. Each treatment group consisted of 4 animals. Blood was drawn the day before dosing to determine baseline and at 5, 12, 19, and 25 days following the dose. Plasma A1AT protein levels were measured via ELISA (see Example 80). The results below are presented as the average percent of plasma A1AT protein levels for each treatment group, normalized to baseline levels. The results show that the oligonucleotides comprising a GalNAc conjugate were more potent and had longer duration of action than the parent lacking a GalNAc conjugate (ISIS 476366). Furthermore, the oligonucleotides comprising a 5′-GalNAc conjugate (ISIS 678381, 678382, 678383, and 678384) were generally even more potent with even longer duration of action than the oligonucleotide comprising a 3′-GalNAc conjugate (ISIS 656326).

TABLE 75
Plasma AlAT protein levels in mice

| | | Time point | A1AT | | |
|---|---|---|---|---|---|
| ISIS | Dosage | (days post- | (% | GalNAc₃ | |
| No. | (mg/kg) | dose) | baseline) | Cluster | CM |
| PBS | n/a | 5 | 93 | n/a | n/a |
| | | 12 | 93 | | |
| | | 19 | 90 | | |
| | | 25 | 97 | | |
| 476366 | 100 | 5 | 38 | n/a | n/a |
| | | 12 | 46 | | |
| | | 19 | 62 | | |
| | | 25 | 77 | | |
| 656326 | 18 | 5 | 33 | GalNAc₃-1a | A_{d} |
| | | 12 | 36 | | |
| | | 19 | 51 | | |
| | | 25 | 72 | | |
| 678381 | 18 | 5 | 21 | GalNAc₃-3a | A_{d} |
| | | 12 | 21 | | |
| | | 19 | 35 | | |
| | | 25 | 48 | | |
| 678382 | 18 | 5 | 21 | GalNAc₃-7a | A_{d} |
| | | 12 | 21 | | |
| | | 19 | 39 | | |
| | | 25 | 60 | | |
| 678383 | 18 | 5 | 24 | GalNAc₃-10a | A_{d} |
| | | 12 | 21 | | |
| | | 19 | 45 | | |
| | | 25 | 73 | | |
| 678384 | 18 | 5 | 29 | GalNAc₃-13a | A_{d} |
| | | 12 | 34 | | |
| | | 19 | 57 | | |
| | | 25 | 76 | | |

### Example 82: Antisense Inhibition In Vitro by Oligonucleotides Targeting SRB3-1 Comprising a GalNAc₃ Conjugate

[0988] Primary mouse liver hepatocytes were seeded in 96 well plates at 15,000 cells/well 2 hours prior to treatment. The oligonucleotides listed in Table 76 were added at 2, 10, 50, or 250 nM in Williams E medium and cells were incubated overnight at 37° C. in 500 CO₂. Cells were lysed 16 hours following oligonucleotide addition, and total RNA was purified using RNease 3000 BioRobot (Qiagen). SRB-1 mRNA levels were determined using real-time PCR and RIBOGREEN® RNA quantification reagent (Molecular Probes, Inc. Eugene, OR) according to standard protocols. IC₅₀ values were determined using Prism 4 software (GraphPad). The results show that oligonucleotides comprising a variety of different GalNAc conjugate groups and a variety of different cleavable moieties are significantly more potent in an in vitro free uptake experiment than the parent oligonucleotides lacking a GalNAc conjugate group (ISIS 353382 and 666841).

TABLE 76
Inhibition of SRB-1 expression in vitro

| ISIS | | | GalNAc | | IC₅₀ | SEQ |
|---|---|---|---|---|---|---|
| No. | Sequences | Linkages | cluster | CM | (nM) | ID No. |
| 353382 | Gₑₛ^{m}CₑₛTₑₛTₑₛ^{m}CₑₛA_{ds}G_{ds}T_{ds}^{m}C_{ds}A_{ds}T_{ds}G_{ds}A_{ds}^{m} | PS | n/a | n/a | 250 | 2256 |
| | C_{ds}T_{ds}Tₑₛ^{m}Cₑₛ^{m}CₑₛTₑₛTₑ | | | | | |
| 655861 | Gₑₛ^{m}CₑₛTₑₛTₑₛ^{m}CₑₛA_{ds}G_{ds}T_{ds}^{m}C_{ds}A_{ds}T_{ds}G_{ds}A_{ds}^{m} | PS | GalNAc₃- | A_{d} | 40 | 2257 |
| | C_{ds}T_{ds}Tₑₛ^{m}Cₑₛ^{m}CₑₛTₑₛTₑₒA_{do′}-GalNAc₃-1ₐ | | 1ₐ | | | |
| 661161 | GalNAc₃-3_{a-o′}A_{do}Gₑₛ^{m}CₑₛTₑₛTₑₛ^{m}CₑₛA_{ds}G_{ds} | PS | GalNAc₃- | A_{d} | 40 | 2258 |
| | T_{ds}^{m}C_{ds}A_{ds}T_{ds}G_{ds}A_{ds}^{m}C_{ds}T_{ds}Tₑₛ^{m}Cₑₛ^{m}CₑₛTₑₛTₑ | | 3ₐ | | | |
| 661162 | GalNAc₃-3_{a-o′}A_{do}Gₑₛ^{m}CₑₛTₑₛTₑₛ^{m}CₑₛA_{ds}G_{ds} | PO/PS | GalNAc₃- | A_{d} | 8 | 2258 |
| | T_{ds}^{m}C_{ds}A_{ds}T_{ds}G_{ds}A_{ds}^{m}C_{ds}T_{ds}Tₑₛ^{m}Cₑₛ^{m}CₑₛTₑₛTₑ | | 3ₐ | | | |
| 664078 | Gₑₛ^{m}CₑₛTₑₛTₑₛ^{m}CₑₛA_{ds}G_{ds}T_{ds}^{m}C_{ds}A_{ds}T_{ds}G_{ds}A_{ds}^{m} | PS | GalNAc₃- | A_{d} | 20 | 2257 |
| | C_{ds}T_{ds}Tₑₛ^{m}Cₑₛ^{m}CₑₛTₑₛTₑₒA_{do′}-GalNAc₃-9ₐ | | 9ₐ | | | |
| 665001 | GalNAc₃-8_{a-o′}A_{do}Gₑₛ^{m}CₑₛTₑₛTₑₛ^{m}CₑₛA_{ds}G_{ds} | PS | GalNAc₃- | A_{d} | 70 | 2258 |
| | T_{ds}^{m}C_{ds}A_{ds}T_{ds}G_{ds}A_{ds}^{m}C_{ds}T_{ds}Tₑₛ^{m}Cₑₛ^{m}CₑₛTₑₛTₑ | | 8ₐ | | | |
| 666224 | GalNAc₃-5_{a-o′}A_{do}Gₑₛ^{m}CₑₛTₑₛTₑₛ^{m}CₑₛA_{ds}G_{ds} | PS | GalNAc₃- | A_{d} | 80 | 2258 |
| | T_{ds}^{m}C_{ds}A_{ds}T_{ds}G_{ds}A_{ds}^{m}C_{ds}T_{ds}Tₑₛ^{m}Cₑₛ^{m}CₑₛTₑₛTₑ | | 5ₐ | | | |
| 666841 | Gₑₛ^{m}CₑₒTₑₒTₑₒ^{m}CₑₛA_{ds}G_{ds}T_{ds}^{m}C_{ds}A_{ds}T_{ds}G_{ds}A_{ds}^{m} | PO/PS | n/a | n/a | >250 | 2256 |
| | C_{ds}T_{ds}Tₒₛ^{m}Cₑₒ^{m}CₑₛTₑₛTₑ | | | | | |
| 666881 | GalNAc₃-10_{a-o′}A_{do}Gₑₛ^{m}CₑₛTₑₛTₑₛ^{m}CₑₛA_{ds}G_{ds} | PS | GalNAc₃- | A_{d} | 30 | 2258 |
| | T_{ds}^{m}C_{ds}A_{ds}T_{ds}G_{ds}A_{ds}^{m}C_{ds}T_{ds}Tₑₛ^{m}Cₑₛ^{m}CₑₛTₑₛTₑ | | 10ₐ | | | |
| 666904 | GalNAc₃-3_{a-o′}Gₑₛ^{m}CₑₛTₑₛTₑₛ^{m}CₑₛA_{ds}G_{ds} | PS | GalNAc₃- | PO | 9 | 2256 |
| | T_{ds}^{m}C_{ds}A_{ds}T_{ds}G_{ds}A_{ds}^{m}C_{ds}T_{ds}Tₑₛ^{m}Cₑₛ^{m}CₑₛTₑₛTₑ | | 3ₐ | | | |
| 666924 | GalNAc₃-3_{a-o′}T_{do}Gₑₛ^{m}CₑₛTₑₛTₑₛ^{m}CₑₛA_{ds}G_{ds} | PS | GalNAc₃- | T_{d} | 15 | 2261 |
| | T_{ds}^{m}C_{ds}A_{ds}T_{ds}G_{ds}A_{ds}^{m}C_{ds}T_{ds}Tₑₛ^{m}Cₑₛ^{m}CₑₛTₑₛTₑ | | 3ₐ | | | |
| 666961 | GalNAc₃-6_{a-o′}A_{do}Gₑₛ^{m}CₑₛTₑₛTₑₛ^{m}CₑₛA_{ds}G_{ds} | PS | GalNAc₃- | A_{d} | 150 | 2258 |
| | T_{ds}^{m}C_{ds}A_{ds}T_{ds}G_{ds}A_{ds}^{m}C_{ds}T_{ds}Tₑₛ^{m}Cₑₛ^{m}CₑₛTₑₛTₑ | | 6ₐ | | | |
| 666981 | GalNAc₃-7_{a-o′}A_{do}Gₑₛ^{m}CₑₛTₑₛTₑₛ^{m}CₑₛA_{ds}G_{ds} | PS | GalNAc₃- | A_{d} | 20 | 2258 |
| | T_{ds}^{m}C_{ds}A_{ds}T_{ds}G_{ds}A_{ds}^{m}C_{ds}T_{ds}Tₑₛ^{m}Cₑₛ^{m}CₑₛTₑₛTₑ | | 7ₐ | | | |
| 670061 | GalNAc₃-13_{a-o′}A_{do}Gₑₛ^{m}CₑₛTₑₛTₑₛ^{m}CₑₛA_{ds}G_{ds} | PS | GalNAc₃- | A_{d} | 30 | 2258 |
| | T_{ds}^{m}C_{ds}A_{ds}T_{ds}G_{ds}A_{ds}^{m}C_{ds}T_{ds}Tₑₛ^{m}Cₑₛ^{m}CₑₛTₑₛTₑ | | 13ₐ | | | |
| 670699 | GalNAc₃-3_{a-o′}T_{do}Gₑₛ^{m}CₑₛTₑₛTₑₛ^{m}CₑₛA_{ds}G_{ds} | PO/PS | GalNAc₃- | T_{d} | 15 | 2261 |
| | T_{ds}^{m}C_{ds}A_{ds}T_{ds}G_{ds}A_{ds}^{m}C_{ds}T_{ds}Tₑₛ^{m}Cₑₛ^{m}CₑₛTₑₛTₑ | | 3ₐ | | | |
| 670700 | GalNAc₃-3_{a-o′}AₑₒGₑₛ^{m}CₑₒTₑₒTₑₒ^{m}CₑₒA_{ds}G_{ds} | PO/PS | GalNAc₃- | Aₑ | 30 | 2258 |
| | T_{ds}^{m}C_{ds}A_{ds}T_{ds}G_{ds}A_{ds}^{m}C_{ds}T_{ds}Tₑₒ^{m}Cₑₒ^{m}CₑₛTₑₛTₑ | | 3ₐ | | | |
| 670701 | GalNAc₃-3_{a-o′}TₑₒGₑₛ^{m}CₑₒTₑₒTₑₒ^{m}CₑₒA_{ds}G_{ds} | PO/PS | GalNAc₃- | Tₑ | 25 | 2261 |
| | T_{ds}^{m}C_{ds}A_{ds}T_{ds}G_{ds}A_{ds}^{m}C_{ds}T_{ds}Tₑₒ^{m}Cₑₒ^{m}CₑₛTₑₛTₑ | | 3ₐ | | | |
| 671144 | GalNAc₃-12_{a-o′}A_{do}Gₑₛ^{m}CₑₛTₑₛTₑₛ^{m}CₑₛA_{ds}G_{ds} | PS | GalNAc₃- | A_{d} | 40 | 2258 |
| | T_{ds}^{m}C_{ds}A_{ds}T_{ds}G_{ds}A_{ds}^{m}C_{ds}T_{ds}Tₑₛ^{m}Cₑₛ^{m}CₑₛTₑₛTₑ | | 12ₐ | | | |
| 671165 | GalNAc₃-13_{a-o′}A_{do}Gₑₛ^{m}CₑₒTₑₒTₑₒ^{m}CₑₒA_{ds}G_{ds} | PO/PS | GalNAc₃- | A_{d} | 8 | 2258 |
| | T_{ds}^{m}C_{ds}A_{ds}T_{ds}G_{ds}A_{ds}^{m}C_{ds}T_{ds}Tₑₒ^{m}Cₑₒ^{m}CₑₛTₑₛTₑ | | 13ₐ | | | |
| 671261 | GalNAc₃-14_{a-o′}A_{do}Gₑₛ^{m}CₑₛTₑₛTₑₛ^{m}CₑₛA_{ds}G_{ds} | PS | GalNAc₃- | A_{d} | >250 | 2258 |
| | T_{ds}^{m}C_{ds}A_{ds}T_{ds}G_{ds}A_{ds}^{m}C_{ds}T_{ds}Tₑₛ^{m}Cₑₛ^{m}CₑₛTₑₛTₑ | | 14ₐ | | | |
| 671262 | GalNAc₃-15_{a-o′}A_{do}Gₑₛ^{m}CₑₛTₑₛTₑₛ^{m}CₑₛA_{ds}G_{ds} | PS | GalNAc₃- | A_{d} | >250 | 2258 |
| | T_{ds}^{m}C_{ds}A_{ds}T_{ds}G_{ds}A_{ds}^{m}C_{ds}T_{ds}Tₑₛ^{m}Cₑₛ^{m}CₑₛTₑₛTₑ | | 15ₐ | | | |
| 673501 | GalNAc₃-7_{a-o′}A_{do}Gₑₒ^{m}CₑₒTₑₒTₑₒ^{m}CₑₒA_{ds}G_{ds} | PO/PS | GalNAc₃- | A_{d} | 30 | 2258 |
| | T_{ds}^{m}C_{ds}A_{ds}T_{ds}G_{ds}A_{ds}^{m}C_{ds}T_{ds}Tₑₒ^{m}Cₑₒ^{m}CₑₛTₑₛTₑ | | 7ₐ | | | |
| 673502 | GalNAc₃-10_{a-o′}A_{do}Gₑₒ^{m}CₑₒTₑₒTₑₒ^{m}CₑₒA_{ds}G_{ds} | PO/PS | GalNAc₃- | A_{d} | 8 | 2258 |
| | T_{ds}^{m}C_{ds}A_{ds}T_{ds}G_{ds}A_{ds}^{m}C_{ds}T_{ds}Tₑₒ^{m}Cₑₒ^{m}CₑₛTₑₛTₑ | | 10ₐ | | | |
| 675441 | GalNAc₃-17_{a-o′}A_{do}Gₑₛ^{m}CₑₛTₑₛTₑₛ^{m}CₑₛA_{ds}G_{ds} | PS | GalNAc₃- | A_{d} | 30 | 2258 |
| | T_{ds}^{m}C_{ds}A_{ds}T_{ds}G_{ds}A_{ds}^{m}C_{ds}T_{ds}Tₑₛ^{m}Cₑₛ^{m}CₑₛTₑₛTₑ | | 17ₐ | | | |
| 675442 | GalNAc₃-18_{a-o′}A_{do}Gₑₛ^{m}CₑₛTₑₛTₑₛ^{m}CₑₛA_{ds}G_{ds} | PS | GalNAc₃- | A_{d} | 20 | 2258 |
| | T_{ds}^{m}C_{ds}A_{ds}T_{ds}G_{ds}A_{ds}^{m}C_{ds}T_{ds}Tₑₛ^{m}Cₑₛ^{m}CₑₛTₑₛTₑ | | 18ₐ | | | |
| 677841 | Gₑₛ^{m}CₑₒTₑₒTₑₒ^{m}CₑₛA_{ds}G_{ds}T_{ds}^{m}C_{ds}A_{ds}T_{ds}G_{ds}A_{ds}^{m} | PS | GalNAc₃- | A_{d} | 40 | 2257 |
| | C_{ds}T_{ds}Tₒₛ^{m}Cₑₒ^{m}CₑₛTₑₛTₑₒA_{do′}-GalNAc₃-19ₐ | | 19ₐ | | | |
| 677842 | Gₑₛ^{m}CₑₒTₑₒTₑₒ^{m}CₑₛA_{ds}G_{ds}T_{ds}^{m}C_{ds}A_{ds}T_{ds}G_{ds}A_{ds}^{m} | PS | GalNAc₃- | A_{d} | 30 | 2257 |
| | C_{ds}T_{ds}Tₒₛ^{m}Cₑₒ^{m}CₑₛTₑₛTₑₒA_{do′}-GalNAc₃-20ₐ | | 20ₐ | | | |
| 677843 | GalNAc₃-23_{a-o′}A_{do}Gₑₛ^{m}CₑₛTₑₛTₑₛ^{m}CₑₛA_{ds}G_{ds} | PS | GalNAc₃- | A_{d} | 40 | 2258 |
| | T_{ds}^{m}C_{ds}A_{ds}T_{ds}G_{ds}A_{ds}^{m}C_{ds}T_{ds}Tₑₛ^{m}Cₑₛ^{m}CₑₛTₑₛTₑ | | 23ₐ | | | |

[0989] The structure of GalNAc₃-1ₐ was shown previously in Example 9, GalNAc₃-3ₐ was shown in Example 39, GalNAc₃-5ₐ was shown in Example 49, GaNAC₃-6ₐ was shown in Example 51, GaNAC₃-7ₐ was shown in Example 48, GalNAc₃-8ₐ was shown in Example 47, GaNAC₃-9ₐ was shown in Example 52, GaNAC₃-Oₐ was shown in Example 46, GalNAc₃-12ₐ was shown in Example 61, GaNAC₃-13ₐ was shown in Example 62, GalNAc₃-14ₐ was shown in Example 63, GaNAC₃-15ₐ was shown in Example 64, GalNAc₃-17ₐ was shown in Example 68, GalNAc₃-18ₐ was shown in Example 69, GaNAC₃-19ₐ was shown in Example 70, GalNAc₃-20ₐ was shown in Example 71, and GalNAc₃-23ₐ was shown in Example 76.

### Example 83: Antisense Inhibition In Vivo by Oligonucleotides Targeting Factor XI Comprising a GalNAc₃ Cluster

[0990] The oligonucleotides listed in Table 77 below were tested in a study for dose-dependent inhibition of Factor XI in mice.

TABLE 77
Modified ASOs targeting Factor XI

| | | | | SEQ |
|---|---|---|---|---|
| ISIS | | GalNAc₃ | | ID |
| No. | Sequence (5′ to 3′) | Cluster | CM | No. |
| 404071 | TₑₛGₑₛGₑₛTₑₛAₑₛA_{ds}T_{ds}^{m}C_{ds}^{m}C_{ds} | n/a | n/a | 2259 |
| | A_{ds}^{m}C_{ds}T_{ds}T_{ds}T_{ds}^{m}C_{ds}AₑₛGₑₛAₑₛ | | | |
| | GₑₛGₑ | | | |
| 656173 | TₑₛGₑₒGₑₒTₑₒAₑₒA_{ds}T_{ds}^{m}C_{ds}^{m}C_{ds} | GalNAc₃- | A_{d} | 2260 |
| | A_{ds}^{m}C_{ds}T_{ds}T_{ds}T_{ds}^{m}C_{ds}AₑₒGₑₒAₑₛ | 1ₐ | | |
| | GₑₛGₑₒA_{do}-GalNAc₃-1ₐ | | | |
| 663086 | GalNAc₃-3_{a-o′}A_{do}TₑₛGₑₒGₑₒTₑₒ | GalNAc₃- | A_{d} | 2268 |
| | AₑₒA_{ds}T_{ds}^{m}C_{ds}^{m}C_{ds}A_{ds}^{m}C_{ds}T_{ds}T_{ds} | 3ₐ | | |
| | T_{ds}^{m}C_{ds}AₑₒGₑₒAₑₛGₑₛGₑ | | | |
| 678347 | GalNAc₃-7_{a-o′}A_{do}TₑₛGₑₒGₑₒTₑₒ | GalNAc₃- | A_{d} | 2268 |
| | AₑₒA_{ds}T_{ds}^{m}C_{ds}^{m}C_{ds}A_{ds}^{m}C_{ds}T_{ds}T_{ds} | 7ₐ | | |
| | T_{ds}^{m}C_{ds}AₑₒGₑₒAₑₛGₑₛGₑ | | | |
| 678348 | GalNAc₃-10_{a-o′}A_{do}TₑₛGₑₒGₑₒTₑₒ | GalNAc₃- | A_{d} | 2268 |
| | AₑₒA_{ds}T_{ds}^{m}C_{ds}^{m}C_{ds}A_{ds}^{m}C_{ds}T_{ds}T_{ds} | 10ₐ | | |
| | T_{ds}^{m}C_{ds}AₑₒGₑₒAₑₛGₑₛGₑ | | | |
| 378349 | GalNAc₃-13_{a-o′}A_{do}TₑₛGₑₒGₑₒTₑₒ | GalNAc₃- | A_{d} | 2268 |
| | AₑₒA_{ds}T_{ds}^{m}C_{ds}^{m}C_{ds}A_{ds}^{m}C_{ds}T_{ds}T_{ds} | 13ₐ | | |
| | T_{ds}^{m}C_{ds}AₑₒGₑₒAₑₛGₑₛGₑ | | | |

[0991] The structure of GalNAc₃-1ₐ was shown previously in Example 9, GalNAc₃-3ₐ was shown in Example 39, GalNAc₃-7ₐ was shown in Example 48, GalNAc₃-10ₐ was shown in Example 46, and GalNAc₃-13ₐ was shown in Example 62.

### Treatment

[0992] Six to eight week old mice were each injected subcutaneously once per week at a dosage shown below, for a total of three doses, with an oligonucleotide listed below or with PBS. Each treatment group consisted of 4 animals. The mice were sacrificed 72 hours following the final dose. Factor XI liver mRNA levels were measured using real-time PCR and normalized to cyclophilin according to standard protocols. Liver transaminases, BUN, and bilirubin were also measured. The results below are presented as the average percent for each treatment group, normalized to the PBS control.

[0993] As illustrated in Table 78, treatment with antisense oligonucleotides lowered Factor XI liver mRNA in a dose-dependent manner. The results show that the oligonucleotides comprising a GalNAc conjugate were more potent than the parent lacking a GalNAc conjugate (ISIS 404071). Furthermore, the oligonucleotides comprising a 5′-GalNAc conjugate (ISIS 663086, 678347, 678348, and 678349) were even more potent than the oligonucleotide comprising a 3′-GalNAc conjugate (ISIS 656173).

TABLE 78
Factor XI liver mRNA, liver transaminase, BUN, and bilirubin levels

| ISIS | Dosage | Factor XI mRNA | ALT | AST | BUN | Bilirubin | GalNAc₃ | SEQ ID |
|---|---|---|---|---|---|---|---|---|
| No. | (mg/kg) | (% PBS) | (U/L) | (U/L) | (mg/dL) | (mg/dL) | Cluster | No. |
| PBS | n/a | 100 | 63 | 70 | 21 | 0.18 | n/a | n/a |
| 404071 | 3 | 65 | 41 | 58 | 21 | 0.15 | n/a | 2259 |
| | 10 | 33 | 49 | 53 | 23 | 0.15 | | |
| | 30 | 17 | 43 | 57 | 22 | 0.14 | | |
| 656173 | 0.7 | 43 | 90 | 89 | 21 | 0.16 | GalNAc₃-1a | 2260 |
| | 2 | 9 | 36 | 58 | 26 | 0.17 | | |
| | 6 | 3 | 50 | 63 | 25 | 0.15 | | |
| 663086 | 0.7 | 33 | 91 | 169 | 25 | 0.16 | GalNAc₃-3a | 2268 |
| | 2 | 7 | 38 | 55 | 21 | 0.16 | | |
| | 6 | 1 | 34 | 40 | 23 | 0.14 | | |
| 678347 | 0.7 | 35 | 28 | 49 | 20 | 0.14 | GalNAc₃-7a | 2268 |
| | 2 | 10 | 180 | 149 | 21 | 0.18 | | |
| | 6 | 1 | 44 | 76 | 19 | 0.15 | | |
| 678348 | 0.7 | 39 | 43 | 54 | 21 | 0.16 | GalNAc₃-10a | 2268 |
| | 2 | 5 | 38 | 55 | 22 | 0.17 | | |
| | 6 | 2 | 25 | 38 | 20 | 0.14 | | |
| 678349 | 0.7 | 34 | 39 | 46 | 20 | 0.16 | GalNAc₃-13a | 2268 |
| | 2 | 8 | 43 | 63 | 21 | 0.14 | | |
| | 6 | 2 | 28 | 41 | 20 | 0.14 | | |

### Example 84: Duration of Action In Vivo of Oligonucleotides Targeting Factor XI Comprising a GalNAc₃ Conjugate

[0994] The oligonucleotides listed in Table 77 were tested in a single dose study for duration of action in mice.

### Treatment

[0995] Six to eight week old mice were each injected subcutaneously once with an oligonucleotide listed in Table 77 or with PBS. Each treatment group consisted of 4 animals. Blood was drawn by tail bleeds the day before dosing to determine baseline and at 3, 10, and 17 days following the dose. Plasma Factor XI protein levels were measured by ELISA using Factor XI capture and biotinylated detection antibodies from R & D Systems, Minneapolis, MN (catalog 4 AF2460 and 4 BAF2460, respectively) and the OptEIA Reagent Set B (Catalog #550534, BD Biosciences, San Jose, CA). The results below are presented as the average percent of plasma Factor XI protein levels for each treatment group, normalized to baseline levels. The results show that the oligonucleotides comprising a GalNAc conjugate were more potent with longer duration of action than the parent lacking a GalNAc conjugate (ISIS 404071). Furthermore, the oligonucleotides comprising a 5′-GalNAc conjugate (ISIS 663086, 678347, 678348, and 678349) were even more potent with an even longer duration of action than the oligonucleotide comprising a 3′-GalNAc conjugate (ISIS 656173).

TABLE 79
Plasma Factor XI protein levels in mice

| | | Time | | | | |
|---|---|---|---|---|---|---|
| | | point | Factor | | | |
| | | (days | XI | | | |
| ISIS | Dosage | post- | (% | GalNAc₃ | | SEQ ID |
| No. | (mg/kg) | dose) | baseline) | Cluster | CM | No. |
| PBS | n/a | 3 | 123 | n/a | n/a | n/a |
| | | 10 | 56 | | | |
| | | 17 | 100 | | | |
| 404071 | 30 | 3 | 11 | n/a | n/a | 2259 |
| | | 10 | 47 | | | |
| | | 17 | 52 | | | |
| 656173 | 6 | 3 | 1 | GalNAc₃-1a | A_{d} | 2260 |
| | | 10 | 3 | | | |
| | | 17 | 21 | | | |
| 663086 | 6 | 3 | 1 | GalNAc₃-3a | A_{d} | 2268 |
| | | 10 | 2 | | | |
| | | 17 | 9 | | | |
| 678347 | 6 | 3 | 1 | GalNAc₃-7a | A_{d} | 2268 |
| | | 10 | 1 | | | |
| | | 17 | 8 | | | |
| 678348 | 6 | 3 | 1 | GalNAc₃-10a | A_{d} | 2268 |
| | | 10 | 1 | | | |
| | | 17 | 6 | | | |
| 678349 | 6 | 3 | 1 | GalNAc₃-13a | A_{d} | 2268 |
| | | 10 | 1 | | | |
| | | 17 | 5 | | | |

### Example 85: Antisense inhibition in vivo by oligonucleotides targeting SRB-1 comprising a GalNAc Conjugate

[0996] Oligonucleotides listed in Table 76 were tested in a dose-dependent study for antisense inhibition of SRB-1 in mice.

### Treatment

[0997] Six to eight week old C57BL/6 mice were each injected subcutaneously once per week at a dosage shown below, for a total of three doses, with an oligonucleotide listed in Table 76 or with saline. Each treatment group consisted of 4 animals. The mice were sacrificed 48 hours following the final administration to determine the SRB-1 mRNA levels using real-time PCR and RIBOGREEN® RNA quantification reagent (Molecular Probes, Inc. Eugene, OR) according to standard protocols. The results below are presented as the average percent of liver SRB-1 mRNA levels for each treatment group, normalized to the saline control.

[0998] As illustrated in Tables 80 and 81, treatment with antisense oligonucleotides lowered SRB-1 mRNA levels in a dose-dependent manner.

TABLE 80
SRB-1 mRNA in liver

| | | SRB-1 mRNA (% | | |
|---|---|---|---|---|
| ISIS No. | Dosage (mg/kg) | Saline) | GalNAc₃ Cluster | CM |
| Saline | n/a | 100 | n/a | n/a |
| 655861 | 0.1 | 94 | GalNAc₃-1a | A_{d} |
| | 0.3 | 119 | | |
| | 1 | 68 | | |
| | 3 | 32 | | |
| 661161 | 0.1 | 120 | GalNAc₃-3a | A_{d} |
| | 0.3 | 107 | | |
| | 1 | 68 | | |
| | 3 | 26 | | |
| 666881 | 0.1 | 107 | GalNAc₃-10a | A_{d} |
| | 0.3 | 107 | | |
| | 1 | 69 | | |
| | 3 | 27 | | |
| 666981 | 0.1 | 120 | GalNAc₃-7a | A_{d} |
| | 0.3 | 103 | | |
| | 1 | 54 | | |
| | 3 | 21 | | |
| 670061 | 0.1 | 118 | GalNAc₃-13a | A_{d} |
| | 0.3 | 89 | | |
| | 1 | 52 | | |
| | 3 | 18 | | |
| 677842 | 0.1 | 119 | GalNAc₃-20a | A_{d} |
| | 0.3 | 96 | | |
| | 1 | 65 | | |
| | 3 | 23 | | |

TABLE 81
SRB-1 mRNA in liver

| | | SRB-1 mRNA (% | | |
|---|---|---|---|---|
| ISIS No. | Dosage (mg/kg) | Saline) | GalNAc₃ Cluster | CM |
| 661161 | 0.1 | 107 | GalNAc₃-3a | A_{d} |
| | 0.3 | 95 | | |
| | 1 | 53 | | |
| | 3 | 18 | | |
| 677841 | 0.1 | 110 | GalNAc₃-19a | A_{d} |
| | 0.3 | 88 | | |
| | 1 | 52 | | |
| | 3 | 25 | | |

[0999] Liver transaminase levels, total bilirubin, BUN, and body weights were also measured using standard protocols. Average values for each treatment group are shown in Table 82 below.

TABLE 82

| ISIS | Dosage | ALT | AST | Bilirubin | BUN | Body Weight | GalNAc₃ | |
|---|---|---|---|---|---|---|---|---|
| No. | (mg/kg) | (U/L) | (U/L) | (mg/dL) | (mg/dL) | (% baseline) | Cluster | CM |
| Saline | n/a | 19 | 39 | 0.17 | 26 | 118 | n/a | n/a |
| 655861 | 0.1 | 25 | 47 | 0.17 | 27 | 114 | GalNAc₃-1a | A_{d} |
| | 0.3 | 29 | 56 | 0.15 | 27 | 118 | | |
| | 1 | 20 | 32 | 0.14 | 24 | 112 | | |
| | 3 | 27 | 54 | 0.14 | 24 | 115 | | |
| 661161 | 0.1 | 35 | 83 | 0.13 | 24 | 113 | GalNAc₃-3a | A_{d} |
| | 0.3 | 42 | 61 | 0.15 | 23 | 117 | | |
| | 1 | 34 | 60 | 0.18 | 22 | 116 | | |
| | 3 | 29 | 52 | 0.13 | 25 | 117 | | |
| 666881 | 0.1 | 30 | 51 | 0.15 | 23 | 118 | GalNAc₃-10a | A_{d} |
| | 0.3 | 49 | 82 | 0.16 | 25 | 119 | | |
| | 1 | 23 | 45 | 0.14 | 24 | 117 | | |
| | 3 | 20 | 38 | 0.15 | 21 | 112 | | |
| 666981 | 0.1 | 21 | 41 | 0.14 | 22 | 113 | GalNAc₃-7a | A_{d} |
| | 0.3 | 29 | 49 | 0.16 | 24 | 112 | | |
| | 1 | 19 | 34 | 0.15 | 22 | 111 | | |
| | 3 | 77 | 78 | 0.18 | 25 | 115 | | |
| 670061 | 0.1 | 20 | 63 | 0.18 | 24 | 111 | GalNAc₃-13a | A_{d} |
| | 0.3 | 20 | 57 | 0.15 | 21 | 115 | | |
| | 1 | 20 | 35 | 0.14 | 20 | 115 | | |
| | 3 | 27 | 42 | 0.12 | 20 | 116 | | |
| 677842 | 0.1 | 20 | 38 | 0.17 | 24 | 114 | GalNAc₃-20a | A_{d} |
| | 0.3 | 31 | 46 | 0.17 | 21 | 117 | | |
| | 1 | 22 | 34 | 0.15 | 21 | 119 | | |
| | 3 | 41 | 57 | 0.14 | 23 | 118 | | |

### Example 86: Antisense Inhibition In Vivo by Oligonucleotides Targeting TTR Comprising a GalNAc₃ Cluster

[1000] Oligonucleotides listed in Table 83 below were tested in a dose-dependent study for antisense inhibition of human transthyretin (TTR) in transgenic mice that express the human TTR gene.

### Treatment

[1001] Eight week old TTR transgenic mice were each injected subcutaneously once per week for three weeks, for a total of three doses, with an oligonucleotide and dosage listed in the tables below or with PBS. Each treatment group consisted of 4 animals. The mice were sacrificed 72 hours following the final administration. Tail bleeds were performed at various time points throughout the experiment, and plasma TTR protein, ALT, and AST levels were measured and reported in Tables 85-87. After the animals were sacrificed, plasma ALT, AST, and human TTR levels were measured, as were body weights, organ weights, and liver human TTR mRNA levels. TTR protein levels were measured using a clinical analyzer (AU480, Beckman Coulter, CA). Real-time PCR and RIBOGREEN® RNA quantification reagent (Molecular Probes, Inc. Eugene, OR) were used according to standard protocols to determine liver human TTR mRNA levels. The results presented in Tables 84-87 are the average values for each treatment group. The mRNA levels are the average values relative to the average for the PBS group. Plasma protein levels are the average values relative to the average value for the PBS group at baseline. Body weights are the average percent weight change from baseline until sacrifice for each individual treatment group. Organ weights shown are normalized to the animal's body weight, and the average normalized organ weight for each treatment group is then presented relative to the average normalized organ weight for the PBS group.

[1002] In Tables 84-87, “BL” indicates baseline, measurements that were taken just prior to the first dose. As illustrated in Tables 84 and 85, treatment with antisense oligonucleotides lowered TTR expression levels in a dose-dependent manner. The oligonucleotides comprising a GalNAc conjugate were more potent than the parent lacking a GalNAc conjugate (ISIS 420915). Furthermore, the oligonucleotides comprising a GalNAc conjugate and mixed PS/PO internucleoside linkages were even more potent than the oligonucleotide comprising a GalNAc conjugate and full PS linkages.

TABLE 83
Oligonucleotides targeting human TTR

| ISIS | | | GalNAc | | SEQ |
|---|---|---|---|---|---|
| No. | Sequences | Linkages | cluster | CM | ID No. |
| 420915 | Tₑₛ^{m}CₑₛTₑₛTₑₛGₑₛG_{ds}T_{ds}T_{ds}A_{ds}^{m}C_{ds}A_{ds}T_{ds} | PS | n/a | n/a | 2269 |
| | G_{ds}A_{ds}A_{ds}AₑₛTₑₛ^{m}Cₑₛ^{m}Cₑₛ^{m}Cₑ | | | | |
| 660261 | Tₑₛ^{m}CₑₛTₑₛTₑₛGₑₛG_{ds}T_{ds}T_{ds}A_{ds}^{m}C_{ds}A_{ds}T_{ds} | PS | GalNAc₃- | A_{d} | 2270 |
| | G_{ds}A_{ds}A_{ds}AₑₛTₑₛ^{m}Cₑₛ^{m}Cₑₛ^{m}CₑₒA_{do}-GalNAc₃-1ₐ | | 1a | | |
| 682883 | GalNAc₃-3_{a-o′}Tₑₛ^{m}CₑₒTₑₒTₑₒGₑₒG_{ds}T_{ds} | PO/PS | GalNAc₃- | PO | 2269 |
| | T_{ds}A_{ds}^{m}C_{ds}A_{ds}T_{ds}G_{ds}A_{ds}A_{ds}AₑₒTₑₒ^{m}Cₑₛ^{m}Cₑₛ^{m}Cₑ | | 3a | | |
| 682884 | GalNAc₃-7_{a-o′}Tₑₛ^{m}CₑₒTₑₒTₑₒGₑₒG_{ds}T_{ds} | PO/PS | GalNAc₃- | PO | 2269 |
| | T_{ds}A_{ds}^{m}C_{ds}A_{ds}T_{ds}G_{ds}A_{ds}A_{ds}AₑₒTₑₒ^{m}Cₑₛ^{m}Cₑₛ^{m}Cₑ | | 7a | | |
| 682885 | GalNAc₃-10_{a-o′}Tₑₛ^{m}CₑₒTₑₒTₑₒGₑₒG_{ds}T_{ds} | PO/PS | GalNAc₃- | PO | 2269 |
| | T_{ds}A_{ds}^{m}C_{ds}A_{ds}T_{ds}G_{ds}A_{ds}A_{ds}AₑₒTₑₒ^{m}Cₑₛ^{m}Cₑₛ^{m}Cₑ | | 10a | | |
| 682886 | GalNAc₃-13_{a-o′}Tₑₛ^{m}CₑₒTₑₒTₑₒGₑₒG_{ds}T_{ds} | PO/PS | GalNAc₃- | PO | 2269 |
| | T_{ds}A_{ds}^{m}C_{ds}A_{ds}T_{ds}G_{ds}A_{ds}A_{ds}AₑₒTₑₒ^{m}Cₑₛ^{m}Cₑₛ^{m}Cₑ | | 13a | | |
| 684057 | Tₑₛ^{m}CₑₒTₑₒTₑₒGₑₒG_{ds}T_{ds}T_{ds}A_{ds}^{m}C_{ds}A_{ds}T_{ds} | PO/PS | GalNAc₃- | A_{d} | 2270 |
| | G_{ds}A_{ds}A_{ds}AₑₒTₑₒ^{m}Cₑₛ^{m}Cₑₛ^{m}CₑₒA_{do}-GalNAc₃-19ₐ | | 19a | | |

[1003] The legend for Table 85 can be found in Example 74. The structure of GalNAc₃-1 was shown in Example 9. The structure of GalNAc₃-3ₐ was shown in Example 39. The structure of GalNAc₃-7ₐ was shown in Example 48. The structure of GalNAc₃-10ₐ was shown in Example 46. The structure of GalNAc₃-13ₐ was shown in Example 62. The structure of GalNAc₃-19ₐ was shown in Example 70.

TABLE 84
Antisense inhibition of human TTR in vivo

| | | | Plasma | | | |
|---|---|---|---|---|---|---|
| | | TTR | TTR | | | |
| Isis | Dosage | mRNA | protein | GalNAc | | SEQ ID |
| No. | (mg/kg) | (% PBS) | (% PBS) | cluster | CM | No. |
| PBS | n/a | 100 | 100 | n/a | n/a | |
| 420915 | 6 | 99 | 95 | n/a | n/a | 2269 |
| | 20 | 48 | 65 | | | |
| | 60 | 18 | 28 | | | |
| 660261 | 0.6 | 113 | 87 | GalNAc₃-1a | A_{d} | 2270 |
| | 2 | 40 | 56 | | | |
| | 6 | 20 | 27 | | | |
| | 20 | 9 | 11 | | | |

TABLE 85
Antisense inhibition of human TTR in vivo

| | | TTR | Plasma TTR protein (% PBS at BL) | | | | | | |
|---|---|---|---|---|---|---|---|---|---|
| Isis | Dosage | mRNA | | | | Day 17 | GalNAc | | SEQ ID |
| No. | (mg/kg) | (% PBS) | BL | Day 3 | Day 10 | (After sac) | cluster | CM | No. |
| PBS | n/a | 100 | 100 | 96 | 90 | 114 | n/a | n/a | |
| 420915 | 6 | 74 | 106 | 86 | 76 | 83 | n/a | n/a | 2269 |
| | 20 | 43 | 102 | 66 | 61 | 58 | | | |
| | 60 | 24 | 92 | 43 | 29 | 32 | | | |
| 682883 | 0.6 | 60 | 88 | 73 | 63 | 68 | GalNAc₃-3a | PO | 2269 |
| | 2 | 18 | 75 | 38 | 23 | 23 | | | |
| | 6 | 10 | 80 | 35 | 11 | 9 | | | |
| 682884 | 0.6 | 56 | 88 | 78 | 63 | 67 | GalNAc₃-7a | PO | 2269 |
| | 2 | 19 | 76 | 44 | 25 | 23 | | | |
| | 6 | 15 | 82 | 35 | 21 | 24 | | | |
| 682885 | 0.6 | 60 | 92 | 77 | 68 | 76 | GalNAc₃-10a | PO | 2269 |
| | 2 | 22 | 93 | 58 | 32 | 32 | | | |
| | 6 | 17 | 85 | 37 | 25 | 20 | | | |
| 682886 | 0.6 | 57 | 91 | 70 | 64 | 69 | GalNAc₃-13a | PO | 2269 |
| | 2 | 21 | 89 | 50 | 31 | 30 | | | |
| | 6 | 18 | 102 | 41 | 24 | 27 | | | |
| 684057 | 0.6 | 53 | 80 | 69 | 56 | 62 | GalNAc₃-19a | A_{d} | 2270 |
| | 2 | 21 | 92 | 55 | 34 | 30 | | | |
| | 6 | 11 | 82 | 50 | 18 | 13 | | | |

TABLE 86
Transaminase levels, body weight changes, and relative organ weights

| Isis | Dosage | ALT (U/L) | | | | AST (U/L) | | | | Body | Liver | Spleen | Kidney | SEQ ID |
|---|---|---|---|---|---|---|---|---|---|---|---|---|---|---|
| No. | (mg/kg) | BL | Day 3 | Day 10 | Day 17 | BL | Day 3 | Day 10 | Day 17 | (% BL) | (% PBS) | (% PBS) | (% PBS) | No. |
| PBS | n/a | 33 | 34 | 33 | 24 | 58 | 62 | 67 | 52 | 105 | 100 | 100 | 100 | n/a |
| 420915 | 6 | 34 | 33 | 27 | 21 | 64 | 59 | 73 | 47 | 115 | 99 | 89 | 91 | 2269 |
| | 20 | 34 | 30 | 28 | 19 | 64 | 54 | 56 | 42 | 111 | 97 | 83 | 89 | |
| | 60 | 34 | 35 | 31 | 24 | 61 | 58 | 71 | 58 | 113 | 102 | 98 | 95 | |
| 660261 | 0.6 | 33 | 38 | 28 | 26 | 70 | 71 | 63 | 59 | 111 | 96 | 99 | 92 | 2270 |
| | 2 | 29 | 32 | 31 | 34 | 61 | 60 | 68 | 61 | 118 | 100 | 92 | 90 | |
| | 6 | 29 | 29 | 28 | 34 | 58 | 59 | 70 | 90 | 114 | 99 | 97 | 95 | |
| | 20 | 33 | 32 | 28 | 33 | 64 | 54 | 68 | 95 | 114 | 101 | 106 | 92 | |

TABLE 87
Transaminase levels, body weight changes, and relative organ weights

| Isis | Dosage | ALT (U/L) | | | | AST (U/L) | | | | Body | Liver | Spleen | Kidney | SEQ ID |
|---|---|---|---|---|---|---|---|---|---|---|---|---|---|---|
| No. | (mg/kg) | BL | Day 3 | Day 10 | Day 17 | BL | Day 3 | Day 10 | Day 17 | (% BL) | (% PBS) | (% PBS) | (% PBS) | No. |
| PBS | n/a | 32 | 34 | 37 | 41 | 62 | 78 | 76 | 77 | 104 | 100 | 100 | 100 | n/a |
| 420915 | 6 | 32 | 30 | 34 | 34 | 61 | 71 | 72 | 66 | 102 | 103 | 102 | 105 | 2269 |
| | 20 | 41 | 34 | 37 | 33 | 80 | 76 | 63 | 54 | 106 | 107 | 135 | 101 | |
| | 60 | 36 | 30 | 32 | 34 | 58 | 81 | 57 | 60 | 106 | 105 | 104 | 99 | |
| 682883 | 0.6 | 32 | 35 | 38 | 40 | 53 | 81 | 74 | 76 | 104 | 101 | 112 | 95 | 2269 |
| | 2 | 38 | 39 | 42 | 43 | 71 | 84 | 70 | 77 | 107 | 98 | 116 | 99 | |
| | 6 | 35 | 35 | 41 | 38 | 62 | 79 | 103 | 65 | 105 | 103 | 143 | 97 | |
| 682884 | 0.6 | 33 | 32 | 35 | 34 | 70 | 74 | 75 | 67 | 101 | 100 | 130 | 99 | 2269 |
| | 2 | 31 | 32 | 38 | 38 | 63 | 77 | 66 | 55 | 104 | 103 | 122 | 100 | |
| | 6 | 38 | 32 | 36 | 34 | 65 | 85 | 80 | 62 | 99 | 105 | 129 | 95 | |
| 682885 | 0.6 | 39 | 26 | 37 | 35 | 63 | 63 | 77 | 59 | 100 | 109 | 109 | 112 | 2269 |
| | 2 | 30 | 26 | 38 | 40 | 54 | 56 | 71 | 72 | 102 | 98 | 111 | 102 | |
| | 6 | 27 | 27 | 34 | 35 | 46 | 52 | 56 | 64 | 102 | 98 | 113 | 96 | |
| 682886 | 0.6 | 30 | 40 | 34 | 36 | 58 | 87 | 54 | 61 | 104 | 99 | 120 | 101 | 2269 |
| | 2 | 27 | 26 | 34 | 36 | 51 | 55 | 55 | 69 | 103 | 91 | 105 | 92 | |
| | 6 | 40 | 28 | 34 | 37 | 107 | 54 | 61 | 69 | 109 | 100 | 102 | 99 | |
| 684057 | 0.6 | 35 | 26 | 33 | 39 | 56 | 51 | 51 | 69 | 104 | 99 | 110 | 102 | 2270 |
| | 2 | 33 | 32 | 31 | 40 | 54 | 57 | 56 | 87 | 103 | 100 | 112 | 97 | |
| | 6 | 39 | 33 | 35 | 40 | 67 | 52 | 55 | 92 | 98 | 104 | 121 | 108 | |

### Example 87: Duration of action in vivo by single doses of oligonucleotides targeting TTR comprising a GalNAc₃ cluster

[1004] ISIS numbers 420915 and 660261 (see Table 83) were tested in a single dose study for duration of action in mice. ISIS numbers 420915, 682883, and 682885 (see Table 83) were also tested in a single dose study for duration of action in mice.

### Treatment

[1005] Eight week old, male transgenic mice that express human TTR were each injected subcutaneously once with 100 mg/kg ISIS No. 420915 or 13.5 mg/kg ISIS No. 660261. Each treatment group consisted of 4 animals. Tail bleeds were performed before dosing to determine baseline and at days 3, 7, 10, 17, 24, and 39 following the dose. Plasma TTR protein levels were measured as described in Example 86. The results below are presented as the average percent of plasma TTR levels for each treatment group, normalized to baseline levels.

TABLE 88
Plasma TTR protein levels

| | | Time | | | | |
|---|---|---|---|---|---|---|
| | | point | | | | |
| | | (days | TTR | | | |
| ISIS | Dosage | post- | (% | GalNAc₃ | | SEQ ID |
| No. | (mg/kg) | dose) | baseline) | Cluster | CM | No. |
| 420915 | 100 | 3 | 30 | n/a | n/a | 2269 |
| | | 7 | 23 | | | |
| | | 10 | 35 | | | |
| | | 17 | 53 | | | |
| | | 24 | 75 | | | |
| | | 39 | 100 | | | |
| 660261 | 13.5 | 3 | 27 | GalNAc₃-1a | A_{d} | 2270 |
| | | 7 | 21 | | | |
| | | 10 | 22 | | | |
| | | 17 | 36 | | | |
| | | 24 | 48 | | | |
| | | 39 | 69 | | | |

### Treatment

[1006] Female transgenic mice that express human TTR were each injected subcutaneously once with 100 mg/kg ISIS No. 420915, 10.0 mg/kg ISIS No. 682883, or 10.0 mg/kg 682885. Each treatment group consisted of 4 animals. Tail bleeds were performed before dosing to determine baseline and at days 3, 7, 10, 17, 24, and 39 following the dose. Plasma TTR protein levels were measured as described in Example 86. The results below are presented as the average percent of plasma TTR levels for each treatment group, normalized to baseline levels.

TABLE 89
Plasma TTR protein levels

| | | Time | | | | |
|---|---|---|---|---|---|---|
| | | point | | | | |
| | | (days | TTR | | | |
| ISIS | Dosage | post- | (% | GalNAc₃ | | SEQ ID |
| No. | (mg/kg) | dose) | baseline) | Cluster | CM | No. |
| 420915 | 100 | 3 | 48 | n/a | n/a | 2269 |
| | | 7 | 48 | | | |
| | | 10 | 48 | | | |
| | | 17 | 66 | | | |
| | | 31 | 80 | | | |
| 682883 | 10.0 | 3 | 45 | GalNAc₃-3a | PO | 2269 |
| | | 7 | 37 | | | |
| | | 10 | 38 | | | |
| | | 17 | 42 | | | |
| | | 31 | 65 | | | |
| 682885 | 10.0 | 3 | 40 | GalNAc₃-10a | PO | 2269 |
| | | 7 | 33 | | | |
| | | 10 | 34 | | | |
| | | 17 | 40 | | | |
| | | 31 | 64 | | | |

[1007] The results in Tables 88 and 89 show that the oligonucleotides comprising a GalNAc conjugate are more potent with a longer duration of action than the parent oligonucleotide lacking a conjugate (ISIS 420915).

### Example 88: Splicing Modulation In Vivo by Oligonucleotides Targeting SMN Comprising a GalNAc₃ Conjugate

[1008] The oligonucleotides listed in Table 90 were tested for splicing modulation of human survival of motor neuron (SMN) in mice.

TABLE 90
Modified ASOs targeting SMN

| | | | | SEQ |
|---|---|---|---|---|
| ISIS | | GalNAc₃ | | ID |
| No. | Sequences (5′ to 3′) | Cluster | CM | No. |
| 387954 | AₑₛTₑₛTₑₛ^{m}CₑₛAₑₛ^{m}CₑₛTₑₛTₑₛ | n/a | n/a | 2271 |
| | Tₑₛ^{m}CₑₛAₑₛTₑₛAₑₛAₑₛTₑₛGₑₛ | | | |
| | ^{m}CₑₛTₑₛGₑₛGₑ | | | |
| 699819 | GalNAc₃-7_{a-o'}AₑₛTₑₛTₑₛ | GalNAc₃- | PO | 2271 |
| | ^{m}CₑₛAₑₛ^{m}CₑₛTₑₛTₑₛTₑₛ^{m}Cₑₛ | 7a | | |
| | AₑₛTₑₛAₑₛAₑₛTₑₛGₑₛ^{m}CₑₛTₑₛ | | | |
| | GₑₛGₑ | | | |
| 699821 | GalNAc₃-7_{a-o'}AₑₛTₑₛTₑₛ | GalNAc₃- | PO | 2271 |
| | ^{m}CₑₛAₑₛ^{m}CₑₛTₑₛTₑₛTₑₛ^{m}Cₑₛ | 7a | | |
| | AₑₛTₑₛAₑₛAₑₛAₑₒTₑₒGₑₒ^{m}Cₑₒ | | | |
| | TₑₛGₑₛGₑ | | | |
| 700000 | AₑₛTₑₛTₑₛ^{m}CₑₛAₑₛ^{m}CₑₛTₑₛ | GalNAc₃- | A_{d} | 2272 |
| | TₑₛTₑₛ^{m}CₑₛAₑₛTₑₛAₑₛAₑₛTₑₛ | 1a | | |
| | Gₑₛ^{m}CₑₛTₑₛGₑₛGₑₒA_{do'}- | | | |
| | GalNAc₃-1ₐ | | | |
| 703421 | X-ATT^{m}CA^{m}CTTT^{m}CATAA | n/a | n/a | 2271 |
| | TG^{m}CTGG | | | |
| 703422 | GalNAc₃-7_{b}-X-ATT^{m}CA^{m}C | GalNAc₃- | n/a | 2271 |
| | TTT^{m}CATAATG^{m}CTGG | 7b | | |

[1009] The structure of GalNAc₃-7ₐ was shown previously in Example 48. “X” indicates a 5′ primary amine generated by Gene Tools (Philomath, OR), and GalNAc₃-7_{b} indicates the structure of GalNAc₃-7ₐ lacking the —NH—C₆—O portion of the linker as shown below:

[chemical structure]

[1010] ISIS numbers 703421 and 703422 are morphlino oligonucleotides, wherein each nucleotide of the two oligonucleotides is a morpholino nucleotide.

### Treatment

[1011] Six week old transgenic mice that express human SMN were injected subcutaneously once with an oligonucleotide listed in Table 91 or with saline. Each treatment group consisted of 2 males and 2 females. The mice were sacrificed 3 days following the dose to determine the liver human SMN mRNA levels both with and without exon 7 using real-time PCR according to standard protocols. Total RNA was measured using Ribogreen reagent. The SMN mRNA levels were normalized to total mRNA, and further normalized to the averages for the saline treatment group. The resulting average ratios of SMN mRNA including exon 7 to SMN mRNA missing exon 7 are shown in Table 91. The results show that fully modified oligonucleotides that modulate splicing and comprise a GalNAc conjugate are significantly more potent in altering splicing in the liver than the parent oligonucleotides lacking a GlaNAc conjugate. Furthermore, this trend is maintained for multiple modification chemistries, including 2′-MOE and morpholino modified oligonucleotides.

TABLE 91
Effect of oligonucleotides targeting human SMN in vivo

| ISIS | | | GalNAc₃ | | SEQ |
|---|---|---|---|---|---|
| No. | Dose (mg/kg) | +Exon 7/−Exon 7 | Cluster | CM | ID No. |
| Saline | n/a | 1.00 | n/a | n/a | n/a |
| 387954 | 32 | 1.65 | n/a | n/a | 2271 |
| 387954 | 288 | 5.00 | n/a | n/a | 2271 |
| 699819 | 32 | 7.84 | GalNAc₃-7a | PO | 2271 |
| 699821 | 32 | 7.22 | GalNAc₃-7a | PO | 2271 |
| 700000 | 32 | 6.91 | GalNAc₃-1a | A_{d} | 2272 |
| 703421 | 32 | 1.27 | n/a | n/a | 2271 |
| 703422 | 32 | 4.12 | GalNAc₃-7b | n/a | 2271 |

### Example 89: Antisense Inhibition In Vivo by Oligonucleotides Targeting Apolipoprotein a (Apo(a)) Comprising a GalNAc₃ Conjugate

[1012] The oligonucleotides listed in Table 92 below were tested in a study for dose-dependent inhibition of Apo(a) in transgenic mice.

TABLE 92
Modified ASOs targeting Apo(a)

| | | | | SEQ |
|---|---|---|---|---|
| ISIS | | GalNAc₃ | | ID |
| No. | Sequence (5′ to 3′) | Cluster | CM | No. |
| 494372 | TₑₛGₑₛ^{m}CₑₛTₑₛ^{m}Cₑₛ^{m}C_{ds}G_{ds}T_{ds}T_{ds} | n/a | n/a | 2281 |
| | G_{ds}G_{ds}T_{ds}G_{ds}^{m}C_{ds}T_{ds}TₑₛGₑₛTₑₛ | | | |
| | Tₑₛ^{m}Cₑ | | | |
| 681287 | GalNAc₃-7_{a-o′}TₑₛGₑₛ^{m}CₑₛTₑₛ^{m} | GalNAc₃- | PO | 2281 |
| | Cₑₛ^{m}C_{ds}G_{ds}T_{ds}T_{ds}G_{ds}G_{ds}T_{ds}G_{ds}^{m} | 7a | | |
| | C_{ds}T_{ds}TₑₛGₑₛTₑₛTₑₛ^{m}Cₑ | | | |

[1013] The structure of GalNAc₃-7ₐ was shown in Example 48.

### Treatment

[1014] Eight week old, female C57BL/6 mice (Jackson Laboratory, Bar Harbor, ME) were each injected subcutaneously once per week at a dosage shown below, for a total of six doses, with an oligonucleotide listed in Table 92 or with PBS. Each treatment group consisted of 3-4 animals. Tail bleeds were performed the day before the first dose and weekly following each dose to determine plasma Apo(a) protein levels. The mice were sacrificed two days following the final administration. Apo(a) liver mRNA levels were determined using real-time PCR and RIBOGREEN® RNA quantification reagent (Molecular Probes, Inc. Eugene, OR) according to standard protocols. Apo(a) plasma protein levels were determined using ELISA, and liver transaminase levels were determined. The mRNA and plasma protein results in Table 93 are presented as the treatment group average percent relative to the PBS treated group. Plasma protein levels were further normalized to the baseline (BL) value for the PBS group. Average absolute transaminase levels and body weights (% relative to baseline averages) are reported in Table 94.

[1015] As illustrated in Table 93, treatment with the oligonucleotides lowered Apo(a) liver mRNA and plasma protein levels in a dose-dependent manner. Furthermore, the oligonucleotide comprising the GalNAc conjugate was significantly more potent with a longer duration of action than the parent oligonucleotide lacking a GalNAc conjugate. As illustrated in Table 94, transaminase levels and body weights were unaffected by the oligonucleotides, indicating that the oligonucleotides were well tolerated.

TABLE 93
Apo(a) liver mRNA and plasma protein levels

| ISIS | Dosage | Apo(a) mRNA | Apo(a) plasma protein (% PBS) | | | | | | |
|---|---|---|---|---|---|---|---|---|---|
| No. | (mg/kg) | (% PBS) | BL | Week 1 | Week 2 | Week 3 | Week 4 | Week 5 | Week 6 |
| PBS | n/a | 100 | 100 | 120 | 119 | 113 | 88 | 121 | 97 |
| 494372 | 3 | 80 | 84 | 89 | 91 | 98 | 87 | 87 | 79 |
| | 10 | 30 | 87 | 72 | 76 | 71 | 57 | 59 | 46 |
| | 30 | 5 | 92 | 54 | 28 | 10 | 7 | 9 | 7 |
| 681257 | 0.3 | 75 | 79 | 76 | 89 | 98 | 71 | 94 | 78 |
| | 1 | 19 | 79 | 88 | 66 | 60 | 54 | 32 | 24 |
| | 3 | 2 | 82 | 52 | 17 | 7 | 4 | 6 | 5 |
| | 10 | 2 | 79 | 17 | 6 | 3 | 2 | 4 | 5 |

TABLE 94

| | | | | Body weight |
|---|---|---|---|---|
| ISIS No. | Dosage (mg/kg) | ALT (U/L) | AST (U/L) | (% baseline) |
| PBS | n/a | 37 | 54 | 103 |
| 494372 | 3 | 28 | 68 | 106 |
| | 10 | 22 | 55 | 102 |
| | 30 | 19 | 48 | 103 |
| 681257 | 0.3 | 30 | 80 | 104 |
| | 1 | 26 | 47 | 105 |
| | 3 | 29 | 62 | 102 |
| | 10 | 21 | 52 | 107 |

### Example 90: Antisense Inhibition In Vivo by Oligonucleotides Targeting TTR Comprising a GalNAc₃ Cluster

[1016] Oligonucleotides listed in Table 95 below were tested in a dose-dependent study for antisense inhibition of human transthyretin (TTR) in transgenic mice that express the human TTR gene.

### Treatment

[1017] TTR transgenic mice were each injected subcutaneously once per week for three weeks, for a total of three doses, with an oligonucleotide and dosage listed in Table 96 or with PBS. Each treatment group consisted of 4 animals. Prior to the first dose, a tail bleed was performed to determine plasma TTR protein levels at baseline (BL). The mice were sacrificed 72 hours following the final administration. TTR protein levels were measured using a clinical analyzer (AU480, Beckman Coulter, CA). Real-time PCR and RIBOGREEN® RNA quantification reagent (Molecular Probes, Inc. Eugene, OR) were used according to standard protocols to determine liver human TTR mRNA levels. The results presented in Table 96 are the average values for each treatment group. The mRNA levels are the average values relative to the average for the PBS group. Plasma protein levels are the average values relative to the average value for the PBS group at baseline. “BL” indicates baseline, measurements that were taken just prior to the first dose. As illustrated in Table 96, treatment with antisense oligonucleotides lowered TTR expression levels in a dose-dependent manner. The oligonucleotides comprising a GalNAc conjugate were more potent than the parent lacking a GalNAc conjugate (ISIS 420915), and oligonucleotides comprising a phosphodiester or deoxyadenosine cleavable moiety showed significant improvements in potency compared to the parent lacking a conjugate (see ISIS numbers 682883 and 666943 vs 420915 and see Examples 86 and 87).

TABLE 95
Oligonucleotides targeting human TTR

| ISIS | | | GalNAc | | SEQ |
|---|---|---|---|---|---|
| No. | Sequences | Linkages | cluster | CM | ID No. |
| 420915 | Tₑₛ^{m}CₑₛTₑₛTₑₛGₑₛG_{ds}T_{ds}T_{ds}A_{ds}^{m}C_{ds}A_{ds}T_{ds} | PS | n/a | n/a | 2269 |
| | G_{ds}A_{ds}A_{ds}AₑₛTₑₛ^{m}Cₑₛ^{m}Cₑₛ^{m}Cₑ | | | | |
| 682883 | GalNAc₃-3_{a-o′}Tₑₛ^{m}CₑₒTₑₒTₑₒGₑₒG_{ds}T_{ds} | PS/PO | GalNAc₃- | PO | 2269 |
| | T_{ds}A_{ds}^{m}C_{ds}A_{ds}T_{ds}G_{ds}A_{ds}A_{ds}AₑₒTₑₒ^{m}Cₑₛ^{m}Cₑₛ^{m}Cₑ | | 3a | | |
| 666943 | GalNAc₃-3_{a-o′}A_{do}Tₑₛ^{m}CₑₒTₑₒTₑₒGₑₒG_{ds}T_{ds} | PS/PO | GalNAc₃- | A_{d} | 2273 |
| | T_{ds}A_{ds}^{m}C_{ds}A_{ds}T_{ds}G_{ds}A_{ds}A_{ds}AₑₒTₑₒ^{m}Cₑₛ^{m}Cₑₛ^{m}Cₑ | | 3a | | |
| 682887 | GalNAc₃-7_{a-o′}A_{do}Tₑₛ^{m}CₑₒTₑₒTₑₒGₑₒG_{ds}T_{ds} | PS/PO | GalNAc₃- | A_{d} | 2273 |
| | T_{ds}A_{ds}^{m}C_{ds}A_{ds}T_{ds}G_{ds}A_{ds}A_{ds}AₑₒTₑₒ^{m}Cₑₛ^{m}Cₑₛ^{m}Cₑ | | 7a | | |
| 682888 | GalNAc₃-10_{a-o′}A_{do}Tₑₛ^{m}CₑₒTₑₒTₑₒGₑₒG_{ds}T_{ds} | PS/PO | GalNAc₃- | A_{d} | 2273 |
| | T_{ds}A_{ds}^{m}C_{ds}A_{ds}T_{ds}G_{ds}A_{ds}A_{ds}AₑₒTₑₒ^{m}Cₑₛ^{m}Cₑₛ^{m}Cₑ | | 10a | | |
| 682889 | GalNAc₃-13_{a-o′}A_{do}Tₑₛ^{m}CₑₒTₑₒTₑₒGₑₒG_{ds}T_{ds} | PS/PO | GalNAc₃- | A_{d} | 2273 |
| | T_{ds}A_{ds}^{m}C_{ds}A_{ds}T_{ds}G_{ds}A_{ds}A_{ds}AₑₒTₑₒ^{m}Cₑₛ^{m}Cₑₛ^{m}Cₑ | | 13a | | |

[1018] The legend for Table 95 can be found in Example 74. The structure of GalNAc3-3a was shown in Example 39. The structure of GalNAc3-7a was shown in Example 48. The structure of GalNAc3-10a was shown in Example 46. The structure of GalNAc3-13a was shown in Example 62.

TABLE 96
Antisense inhibition of human TTR in vivo

| | Dosage | TTR mRNA | TTR | GalNAc | |
|---|---|---|---|---|---|
| Isis No. | (mg/kg) | (% PBS) | protein (% BL) | cluster | CM |
| PBS | n/a | 100 | 124 | n/a | n/a |
| 420915 | 6 | 69 | 114 | n/a | n/a |
| | 20 | 71 | 86 | | |
| | 60 | 21 | 36 | | |
| 682883 | 0.6 | 61 | 73 | GalNAc₃-3a | PO |
| | 2 | 23 | 36 | | |
| | 6 | 18 | 23 | | |
| 666943 | 0.6 | 74 | 93 | GalNAc₃-3a | A_{d} |
| | 2 | 33 | 57 | | |
| | 6 | 17 | 22 | | |
| 682887 | 0.6 | 60 | 97 | GalNAc₃-7a | A_{d} |
| | 2 | 36 | 49 | | |
| | 6 | 12 | 19 | | |
| 682888 | 0.6 | 65 | 92 | GalNAc₃-10a | A_{d} |
| | 2 | 32 | 46 | | |
| | 6 | 17 | 22 | | |
| 682889 | 0.6 | 72 | 74 | GalNAc₃-13a | A_{d} |
| | 2 | 38 | 45 | | |
| | 6 | 16 | 18 | | |

### Example 91: Antisense Inhibition In Vivo by Oligonucleotides Targeting Factor VII Comprising a GalNAc₃ Conjugate in Non-Human Primates

[1019] Oligonucleotides listed in Table 97 below were tested in a non-terminal, dose escalation study for antisense inhibition of Factor VII in monkeys.

### Treatment

[1020] Non-naïve monkeys were each injected subcutaneously on days 0, 15, and 29 with escalating doses of an oligonucleotide listed in Table 97 or with PBS. Each treatment group consisted of 4 males and 1 female. Prior to the first dose and at various time points thereafter, blood draws were performed to determine plasma Factor VII protein levels. Factor VII protein levels were measured by ELISA. The results presented in Table 98 are the average values for each treatment group relative to the average value for the PBS group at baseline (BL), the measurements taken just prior to the first dose. As illustrated in Table 98, treatment with antisense oligonucleotides lowered Factor VII expression levels in a dose-dependent manner, and the oligonucleotide comprising the GalNAc conjugate was significantly more potent in monkeys compared to the oligonucleotide lacking a GalNAc conjugate.

TABLE 97
Oligonucleotides targeting human TTR

| ISIS | | | GalNAc | | SEQ |
|---|---|---|---|---|---|
| No. | Sequences | Linkages | cluster | CM | ID No. |
| 407935 | AₑₛTₑₛGₑₛ^{m}CₑₛAₑₛT_{ds}G_{ds}G_{ds}T_{ds}G_{ds}A_{ds}T_{ds}G_{ds}^{m}C_{ds} | PS | n/a | n/a | 2274 |
| | T_{ds}Tₑₛ^{m}CₑₛTₑₛGₑₛAₑ | | | | |
| 686892 | GalNAc₃-10_{a-o′}AₑₛTₑₛGₑₛ^{m}CₑₛAₑₛT_{ds}G_{ds}G_{ds}T_{ds} | PS | GalNAc₃- | PO | 2274 |
| | G_{ds}A_{ds}T_{ds}G_{ds}^{m}C_{ds}T_{ds}Tₑₛ^{m}CₑₛTₑₛGₑₛAₑ | | 10a | | |

[1021] The legend for Table 97 can be found in Example 74. The structure of GalNAc₃-10ₐ was shown in Example 46.

TABLE 98
Factor VII plasma protein levels

| ISIS No. | Day | Dose (mg/kg) | Factor VII (% BL) |
|---|---|---|---|
| 407935 | 0 | n/a | 100 |
| | 15 | 10 | 87 |
| | 22 | n/a | 92 |
| | 29 | 30 | 77 |
| | 36 | n/a | 46 |
| | 43 | n/a | 43 |
| 686892 | 0 | 3 | 100 |
| | 15 | 10 | 56 |
| | 22 | n/a | 29 |
| | 29 | 30 | 19 |
| | 36 | n/a | 15 |
| | 43 | n/a | 11 |

### Example 92: Antisense Inhibition in Primary Hepatocytes by Antisense Oligonucleotides Targeting Apo-CIII Comprising a GalNAc₃ Conjugate

[1022] Primary mouse hepatocytes were seeded in 96-well plates at 15,000 cells per well, and the oligonucleotides listed in Table 99, targeting mouse ApoC-III, were added at 0.46, 1.37, 4.12, or 12.35, 37.04, 111.11, or 333.33 nM or 1.00 μM. After incubation with the oligonucleotides for 24 hours, the cells were lysed and total RNA was purified using RNeasy (Qiagen). ApoC-III mRNA levels were determined using real-time PCR and RIBOGREEN® RNA quantification reagent (Molecular Probes, Inc.) according to standard protocols. IC₅₀ values were determined using Prism 4 software (GraphPad). The results show that regardless of whether the cleavable moiety was a phosphodiester or a phosphodiester-linked deoxyadensoine, the oligonucleotides comprising a GalNAc conjugate were significantly more potent than the parent oligonucleotide lacking a conjugate.

TABLE 99
Inhibition of mouse APOC-III expression in mouse
primary hepatocytes

| | | | | SEQ |
|---|---|---|---|---|
| ISIS | | | IC₅₀ | ID |
| No. | Sequence (5′ to 3′) | CM | (nM) | No. |
| 440670 | ^{m}CₑₛAₑₛGₑₛ^{m}CₑₛTₑₛT_{ds}T_{ds}A_{ds}T_{ds}T_{ds} | n/a | 13.20 | 2275 |
| | A_{ds}G_{ds}G_{ds}G_{ds}A_{ds}^{m}CₑₛAₑₛGₑₛ^{m}CₑₛAₑ | | | |
| 661180 | ^{m}CₑₛAₑₛGₑₛ^{m}CₑₛTₑₛT_{ds}T_{ds}A_{ds}T_{ds}T_{ds} | A_{d} | 1.40 | 2276 |
| | A_{ds}G_{ds}G_{ds}G_{ds}A_{ds}^{m}CₑₛAₑₛGₑₛ^{m}CₑₛAₑₒ | | | |
| | A_{do′}-GalNAc₃-1ₐ | | | |
| 680771 | GalNAc₃-3_{a-o′}^{m}CₑₛAₑₛGₑₛ^{m}CₑₛTₑₛ | PO | 0.70 | 2275 |
| | T_{ds}T_{ds}A_{ds}T_{ds}T_{ds}A_{ds}G_{ds}G_{ds}G_{ds}A_{ds}^{m} | | | |
| | CₑₛAₑₛGₑₛ^{m}CₑₛAₑ | | | |
| 680772 | GalNAc₃-7_{a-o′}^{m}CₑₛAₑₛGₑₛ^{m}CₑₛTₑₛ | PO | 1.70 | 2275 |
| | T_{ds}T_{ds}A_{ds}T_{ds}T_{ds}A_{ds}G_{ds}G_{ds}G_{ds}A_{ds}^{m} | | | |
| | CₑₛAₑₛGₑₛ^{m}CₑₛAₑ | | | |
| 680773 | GalNAc₃-10_{a-o′}^{m}CₑₛAₑₛGₑₛ^{m}CₑₛTₑₛ | PO | 2.00 | 2275 |
| | T_{ds}T_{ds}A_{ds}T_{ds}T_{ds}A_{ds}G_{ds}G_{ds}G_{ds}A_{ds}^{m} | | | |
| | CₑₛAₑₛGₑₛ^{m}CₑₛAₑ | | | |
| 680774 | GalNAc₃-13_{a-o′}^{m}CₑₛAₑₛGₑₛ^{m}CₑₛTₑₛ | PO | 1.50 | 2275 |
| | T_{ds}T_{ds}A_{ds}T_{ds}T_{ds}A_{ds}G_{ds}G_{ds}G_{ds}A_{ds}^{m} | | | |
| | CₑₛAₑₛGₑₛ^{m}CₑₛAₑ | | | |
| 681272 | GalNAc₃-3_{a-o′}^{m}CₑₛAₑₒGₑₒ^{m}CₑₒTₑₒ | PO | <0.46 | 2275 |
| | T_{ds}T_{ds}A_{ds}T_{ds}T_{ds}A_{ds}G_{ds}G_{ds}G_{ds}A_{ds}^{m} | | | |
| | CₑₒAₑₒGₑₛ^{m}CₑₛAₑ | | | |
| 681273 | GalNAc₃-3_{a-o′}A_{do′}^{m}CₑₛAₑₛGₑₛ^{m}Cₑₛ | A_{d} | 1.10 | 2277 |
| | TₑₛT_{ds}T_{ds}A_{ds}T_{ds}T_{ds}A_{ds}G_{ds}G_{ds}G_{ds} | | | |
| | A_{ds}^{m}CₑₛAₑₛGₑₛ^{m}CₑₛAₑ | | | |
| 683733 | ^{m}CₑₛAₑₛGₑₛ^{m}CₑₛTₑₛT_{ds}T_{ds}A_{ds}T_{ds}T_{ds} | A_{d} | 2.50 | 2276 |
| | A_{ds}G_{ds}G_{ds}G_{ds}A_{ds}^{m}CₑₛAₑₛGₑₛ^{m}CₑₛAₑₒ | | | |
| | A_{do′}-GalNAc₃-19ₐ | | | |

[1023] The structure of GalNAc₃-1ₐ was shown previously in Example 9, GalNAc₃-3ₐ was shown in Example 39, GalNAc₃-7ₐ was shown in Example 48, GalNAc₃-10ₐ was shown in Example 46, GalNAc₃-13ₐ was shown in Example 62, and GalNAc₃-19ₐ was shown in Example 70.

### Example 93: Antisense Inhibition In Vivo by Oligonucleotides Targeting SRB-1 Comprising Mixed Wings and a 5′-GalNAc₃ Conjugate

[1024] The oligonucleotides listed in Table 100 were tested in a dose-dependent study for antisense inhibition of SRB-1 in mice.

TABLE 100
Modified ASOs targeting SRB-1

| | | | | SEQ |
|---|---|---|---|---|
| ISIS | | GalNAC₃ | | ID |
| No. | Sequences (5′ to 3′) | Cluster | CM | No. |
| 449093 | TₖₛTₖₛ^{m}CₖₛA_{ds}G_{ds}T_{ds}^{m}C_{ds}A_{ds}T_{ds}G_{ds} | n/a | n/a | 2278 |
| | A_{ds}^{m}C_{ds}T_{ds}Tₖₛ^{m}Cₖₛ^{m}Cₖ | | | |
| 699806 | GalNAc₃-3_{a-o′}TₖₛTₖₛ^{m}CₖₛA_{ds}G_{ds} | GalNAc₃- | PO | 2278 |
| | T_{ds}^{m}C_{ds}A_{ds}T_{ds}G_{ds}A_{ds}^{m}C_{ds}T_{ds}Tₖₛ^{m} | 3a | | |
| | Cₖₛ^{m}Cₖ | | | |
| 699807 | GalNAc₃-7_{a-o′}TₖₛTₖₛ^{m}CₖₛA_{ds}G_{ds} | GalNAc₃- | PO | 2278 |
| | T_{ds}^{m}C_{ds}A_{ds}T_{ds}G_{ds}A_{ds}^{m}C_{ds}T_{ds}Tₖₛ^{m} | 7a | | |
| | C_{ds}^{m}Cₖ | | | |
| 699809 | GalNAc₃-7_{a-o′}TₖₛTₖₛ^{m}CₖₛA_{ds}G_{ds} | GalNAc₃- | PO | 2278 |
| | T_{ds}^{m}C_{ds}A_{ds}T_{ds}G_{ds}A_{ds}^{m}C_{ds}T_{ds}Tₑₛ^{m} | 7a | | |
| | Cₑₛ^{m}Cₑ | | | |
| 699811 | GalNAc₃-7_{a-o′}TₑₛTₑₛ^{m}CₑₛA_{ds}G_{ds} | GalNAc₃- | PO | 2278 |
| | T_{ds}^{m}C_{ds}A_{ds}T_{ds}G_{ds}A_{ds}^{m}C_{ds}T_{ds}Tₖₛ^{m} | 7a | | |
| | Cₖₛ^{m}Cₖ | | | |
| 699813 | GalNAc₃-7_{a-o′}TₖₛT_{ds}^{m}CₖₛA_{ds}G_{ds} | GalNAc₃- | PO | 2278 |
| | T_{ds}^{m}C_{ds}A_{ds}T_{ds}G_{ds}A_{ds}^{m}C_{ds}T_{ds}Tₖₛ^{m} | 7a | | |
| | C_{ds}^{m}Cₖ | | | |
| 699815 | GalNAc₃-7_{a-o′}TₑₛTₖₛ^{m}CₖₛA_{ds}G_{ds} | GalNAc₃- | PO | 2278 |
| | T_{ds}^{m}C_{ds}A_{ds}T_{ds}G_{ds}A_{ds}^{m}C_{ds}T_{ds}Tₖₛ^{m} | 7a | | |
| | Cₖₛ^{m}Cₑ | | | |

[1025] The structure of GalNAc₃-3 was shown previously in Example 39, and the structure of GalNAc3-7a was shown previously in Example 48. Subscripts: “e” indicates 2′-MOE modified nucleoside; “d” indicates β-D-2′-deoxyribonucleoside; “k” indicates 6′-(S)—CH₃ bicyclic nucleoside (cEt); “s” indicates phosphorothioate internucleoside linkages (PS); “o” indicates phosphodiester internucleoside linkages (PO). Supersript “m” indicates 5-methylcytosines.

### Treatment

[1026] Six to eight week old C57BL/6 mice (Jackson Laboratory, Bar Harbor, ME) were injected subcutaneously once at the dosage shown below with an oligonucleotide listed in Table 100 or with saline. Each treatment group consisted of 4 animals. The mice were sacrificed 72 hours following the final administration. Liver SRB-1 mRNA levels were measured using real-time PCR. SRB-1 mRNA levels were normalized to cyclophilin mRNA levels according to standard protocols. The results are presented as the average percent of SRB-1 mRNA levels for each treatment group relative to the saline control group. As illustrated in Table 101, treatment with antisense oligonucleotides lowered SRB-1 mRNA levels in a dose-dependent manner, and the gapmer oligonucleotides comprising a GalNAc conjugate and having wings that were either full cEt or mixed sugar modifications were significantly more potent than the parent oligonucleotide lacking a conjugate and comprising full cEt modified wings.

[1027] Body weights, liver transaminases, total bilirubin, and BUN were also measured, and the average values for each treatment group are shown in Table 101. Body weight is shown as the average percent body weight relative to the baseline body weight (% BL) measured just prior to the oligonucleotide dose.

TABLE 101
SRB-1 mRNA, ALT, AST, BUN, and total
bilirubin levels and body weights

| | | SRB-1 | | | | | |
|---|---|---|---|---|---|---|---|
| ISIS | Dosage | mRNA | ALT | AST | | | Body weight |
| No. | (mg/kg) | (% PBS) | (U/L) | (U/L) | Bil | BUN | (% BL) |
| PBS | n/a | 100 | 31 | 84 | 0.15 | 28 | 102 |
| 449093 | 1 | 111 | 18 | 48 | 0.17 | 31 | 104 |
| | 3 | 94 | 20 | 43 | 0.15 | 26 | 103 |
| | 10 | 36 | 19 | 50 | 0.12 | 29 | 104 |
| 699806 | 0.1 | 114 | 23 | 58 | 0.13 | 26 | 107 |
| | 0.3 | 59 | 21 | 45 | 0.12 | 27 | 108 |
| | 1 | 25 | 30 | 61 | 0.12 | 30 | 104 |
| 699807 | 0.1 | 121 | 19 | 41 | 0.14 | 25 | 100 |
| | 0.3 | 73 | 23 | 56 | 0.13 | 26 | 105 |
| | 1 | 24 | 22 | 69 | 0.14 | 25 | 102 |
| 699809 | 0.1 | 125 | 23 | 57 | 0.14 | 26 | 104 |
| | 0.3 | 70 | 20 | 49 | 0.10 | 25 | 105 |
| | 1 | 33 | 34 | 62 | 0.17 | 25 | 107 |
| 699811 | 0.1 | 123 | 48 | 77 | 0.14 | 24 | 106 |
| | 0.3 | 94 | 20 | 45 | 0.13 | 25 | 101 |
| | 1 | 66 | 57 | 104 | 0.14 | 24 | 107 |
| 699813 | 0.1 | 95 | 20 | 58 | 0.13 | 28 | 104 |
| | 0.3 | 98 | 22 | 61 | 0.17 | 28 | 105 |
| | 1 | 49 | 19 | 47 | 0.11 | 27 | 106 |
| 699815 | 0.1 | 93 | 30 | 79 | 0.17 | 25 | 105 |
| | 0.3 | 64 | 30 | 61 | 0.12 | 26 | 105 |
| | 1 | 24 | 18 | 41 | 0.14 | 25 | 106 |

### Example 94: Antisense Inhibition In Vivo by Oligonucleotides Targeting SRB-1 Comprising 2′-Sugar Modifications and a 5′-GalNAc₃ Conjugate

[1028] The oligonucleotides listed in Table 102 were tested in a dose-dependent study for antisense inhibition of SRB-1 in mice.

TABLE 102
Modified ASOs targeting SRB-1

| | | | | SEQ |
|---|---|---|---|---|
| ISIS | | GalNAc₃ | | ID |
| No. | Sequences (5′ to 3′) | Cluster | CM | No. |
| 353382 | Gₑₛ^{m}CₑₛTₑₛTₑₛ^{m}CₑₛA_{ds}G_{ds}T_{ds}^{m}C_{ds}A_{ds} | n/a | n/a | 2256 |
| | T_{ds}G_{ds}A_{ds}^{m}C_{ds}T_{ds}Tₑₛ^{m}Cₑₛ^{m}CₑₛTₑₛTₑ | | | |
| 700989 | GₘₛCₘₛUₘₛUₘₛCₘₛA_{ds}G_{ds}T_{ds}^{m}C_{ds}A_{ds}T_{ds} | n/a | n/a | 2279 |
| | G_{ds}A_{ds}^{m}C_{ds}T_{ds}UₘₛCₘₛCₘₛUₘₛUₘ | | | |
| 666904 | GalNAc₃-3_{a-o′}Gₑₛ^{m}CₑₛTₑₛTₑₛ^{m}CₑₛA_{ds} | GalNAc₃- | PO | 2256 |
| | G_{ds}T_{ds}^{m}C_{ds}A_{ds}T_{ds}G_{ds}A_{ds}^{m}C_{ds}T_{ds}Tₑₛ^{m} | 3a | | |
| | Cₑₛ^{m}CₑₛTₑₛTₑ | | | |
| 700991 | GalNAc₃-7_{a-o′}GₘₛCₘₛUₘₛUₘₛCₘₛA_{ds} | GalNAc₃- | PO | 2279 |
| | G_{ds}T_{ds}^{m}C_{ds}A_{ds}T_{ds}G_{ds}A_{ds}^{m}C_{ds}T_{ds}Uₘₛ | 7a | | |
| | CₘₛCₘₛUₘₛUₘ | | | |

[1029] Subscript “in” indicates a 2′-O-methyl modified nucleoside. See Example 74 for complete table legend. The structure of GalNAc₃-3ₐ was shown previously in Example 39, and the structure of GalNAc₃-7a was shown previously in Example 48.

### Treatment

[1030] The study was completed using the protocol described in Example 93. Results are shown in Table 103 below and show that both the 2′-MOE and 2′-OMe modified oligonucleotides comprising a GalNAc conjugate were significantly more potent than the respective parent oligonucleotides lacking a conjugate. The results of the body weights, liver transaminases, total bilirubin, and BUN measurements indicated that the compounds were all well tolerated

TABLE 103
SRB-1 mRNA

| ISIS No. | Dosage (mg/kg) | SRB-1 mRNA (% PBS) |
|---|---|---|
| PBS | n/a | 100 |
| 353382 | 5 | 116 |
| | 15 | 58 |
| | 45 | 27 |
| 700989 | 5 | 120 |
| | 15 | 92 |
| | 45 | 46 |
| 666904 | 1 | 98 |
| | 3 | 45 |
| | 10 | 17 |
| 700991 | 1 | 118 |
| | 3 | 63 |
| | 10 | 14 |

### Example 95: Antisense Inhibition In Vivo by Oligonucleotides Targeting SRB-1 Comprising Bicyclic Nucleosides and a 5′-GalNAc₃ Conjugate

[1031] The oligonucleotides listed in Table 104 were tested in a dose-dependent study for antisense inhibition of SRB-1 in mice.

TABLE 104
Modified ASOs targeting SRB-1

| | | | | SEQ |
|---|---|---|---|---|
| ISIS | | GalNAc₃ | | ID |
| No. | Sequences (5′ to 3′) | Cluster | CM | No. |
| 440762 | Tₖₛ^{m}CₖₛA_{ds}G_{ds}T_{ds}^{m}C_{ds}A_{ds}T_{ds}G_{ds}A_{ds}^{m} | n/a | n/a | 2250 |
| | C_{ds}T_{ds}Tₖₛ^{m}Cₖ | | | |
| 666905 | GalNAc₃-3_{a-o′}Tₖₛ^{m}C_{ds}A_{ds}G_{ds}T_{ds}^{m} | GalNAc₃- | PO | 2250 |
| | C_{ds}A_{ds}T_{ds}G_{ds}A_{ds}^{m}C_{ds}T_{ds}Tₖₛ^{m}Cₖ | 3ₐ | | |
| 699782 | GalNAc₃-7_{a-o′}Tₖₛ^{m}CₖₛA_{ds}G_{ds}T_{ds}^{m} | GalNAc₃- | PO | 2250 |
| | C_{ds}A_{ds}T_{ds}G_{ds}A_{ds}^{m}C_{ds}T_{ds}Tₖₛ^{m}Cₖ | 7ₐ | | |
| 699783 | GalNAc₃-3_{a-o′}Tₗₛ^{m}CₗₛA_{ds}G_{ds}T_{ds}^{m} | GalNAc₃- | PO | 2250 |
| | C_{ds}A_{ds}T_{ds}G_{ds}A_{ds}^{m}C_{ds}T_{ds}Tls^{m}Cₗ | 3ₐ | | |
| 653621 | Tₗₛ^{m}CₗₛA_{ds}G_{ds}T_{ds}^{m}C_{ds}A_{ds}T_{ds}G_{ds}A_{ds}^{m} | GalNAc₃- | A_{d} | 2251 |
| | C_{ds}T_{ds}Tₗₛ^{m}CₗₒA_{do′}-GalNAc₃-1ₐ | 1ₐ | | |
| 439879 | T_{gs}^{m}C_{gs}A_{ds}G_{ds}T_{ds}^{m}C_{ds}A_{ds}T_{d}G_{ds}A_{ds}^{m} | n/a | n/a | 2250 |
| | C_{ds}T_{ds}T_{gs}^{m}C_{g} | | | |
| 699789 | GalNAc₃-3_{a-o′}T_{gs}^{m}C_{gs}A_{ds}G_{ds}T_{ds}^{m} | GalNAc₃- | PO | 2250 |
| | C_{ds}A_{ds}T_{d}G_{ds}A_{ds}^{m}C_{ds}T_{ds}T_{gs}^{m}C_{g} | 3ₐ | | |

[1032] Subscript “g” indicates a fluoro-HNA nucleoside, subscript “1” indicates a locked nucleoside comprising a 2′-O—CH₂-4′ bridge. See the Example 74 table legend for other abbreviations. The structure of GalNAc₃-1ₐ was shown previously in Example 9, the structure of GalNAc₃-3ₐ was shown previously in Example 39, and the structure of GalNAc₃-7a was shown previously in Example 48.

### Treatment

[1033] The study was completed using the protocol described in Example 93. Results are shown in Table 105 below and show that oligonucleotides comprising a GalNAc conjugate and various bicyclic nucleoside modifications were significantly more potent than the parent oligonucleotide lacking a conjugate and comprising bicyclic nucleoside modifications. Furthermore, the oligonucleotide comprising a GalNAc conjugate and fluoro-HNA modifications was significantly more potent than the parent lacking a conjugate and comprising fluoro-HNA modifications. The results of the body weights, liver transaminases, total bilirubin, and BUN measurements indicated that the compounds were all well tolerated.

TABLE 105
SRB-1 mRNA, ALT, AST, BUN,
and total bilirubin levels and body weights

| ISIS No. | Dosage (mg/kg) | SRB-1 mRNA (% PBS) |
|---|---|---|
| PBS | n/a | 100 |
| 440762 | 1 | 104 |
| | 3 | 65 |
| | 10 | 35 |
| 666905 | 0.1 | 105 |
| | 0.3 | 56 |
| | 1 | 18 |
| 699782 | 0.1 | 93 |
| | 0.3 | 63 |
| | 1 | 15 |
| 699783 | 0.1 | 105 |
| | 0.3 | 53 |
| | 1 | 12 |
| 653621 | 0.1 | 109 |
| | 0.3 | 82 |
| | 1 | 27 |
| 439879 | 1 | 96 |
| | 3 | 77 |
| | 10 | 37 |
| 699789 | 0.1 | 82 |
| | 0.3 | 69 |
| | 1 | 26 |

### Example 96: Plasma Protein Binding of Antisense Oligonucleotides Comprising a GalNAc₃ Conjugate Group

[1034] Oligonucleotides listed in Table 70 targeting ApoC-III and oligonucleotides in Table 106 targeting Apo(a) were tested in an ultra-filtration assay in order to assess plasma protein binding.

TABLE 106
Modified oligonucleotides targeting Apo(a)

| | | | | SEQ |
|---|---|---|---|---|
| ISIS | | GalNAc₃ | | ID |
| No. | Sequences (5′ to 3′) | Cluster | CM | No. |
| 494372 | TₑₛGₑₛ^{m}CₑₛTₑₛ^{m}Cₑₛ^{m}C_{ds}G_{ds}T_{ds}T_{ds} | n/a | n/a | 2281 |
| | G_{ds}G_{ds}T_{ds}G_{ds}^{m}C_{ds}T_{ds}TₑₛGₑₛTₑₛ | | | |
| | Tₑₛ^{m}Cₑ | | | |
| 693401 | TₑₛGₑₒ^{m}CₑₒTₑₒ^{m}Cₑₒ^{m}C_{ds}G_{ds}T_{ds}T_{ds} | n/a | n/a | 2281 |
| | G_{ds}G_{ds}T_{ds}G_{ds}^{m}C_{ds}T_{ds}TₑₒGₑₒTₑₛ | | | |
| | Tₑₛ^{m}Cₑ | | | |
| 681251 | GalNAc₃-7_{a-o′}TₑₛGₑₛ^{m}CₑₛTₑₛ^{m} | GalNAc₃- | PO | 2281 |
| | Cₑₛ^{m}C_{ds}G_{ds}T_{ds}T_{ds}G_{ds}G_{ds}T_{ds}G_{ds}^{m} | 7ₐ | | |
| | C_{ds}T_{ds}TₑₛGₑₛTₑₛTₑₛ^{m}Cₑ | | | |
| 681257 | GalNAc₃-7_{a-o′}TₑₛGₑₒ^{m}CₑₒTₑₒ^{m} | GalNAc₃- | PO | 2281 |
| | Cₑₒ^{m}C_{ds}G_{ds}T_{ds}T_{ds}G_{ds}G_{ds}T_{ds}G_{ds}^{m} | 7ₐ | | |
| | C_{ds}T_{ds}TₑₒGₑₒTₑₛTₑₛ^{m}Cₑ | | | |

See the Example 4 for table legend. The structure of GalNAc₃-7a was shown previously in Example 48.

[1035] Ultrafree-MC ultrafiltration units (30,000 NMWL, low-binding regenerated cellulose membrane, Millipore, Bedford, MA) were pre-conditioned with 300 μL of 0.5% Tween 80 and centrifuged at 2000 g for 10 minutes, then with 300 μL of a 300 μg/mL solution of a control oligonucleotide in H₂O and centrifuged at 2000 g for 16 minutes. In order to assess non-specific binding to the filters of each test oligonucleotide from Tables 70 and 106 to be used in the studies, 300 μL of a 250 ng/mL solution of oligonucleotide in H₂O at pH 7.4 was placed in the pre-conditioned filters and centrifuged at 2000 g for 16 minutes. The unfiltered and filtered samples were analyzed by an ELISA assay to determine the oligonucleotide concentrations. Three replicates were used to obtain an average concentration for each sample. The average concentration of the filtered sample relative to the unfiltered sample is used to determine the percent of oligonucleotide that is recovered through the filter in the absence of plasma (% recovery).

[1036] Frozen whole plasma samples collected in K3-EDTA from normal, drug-free human volunteers, cynomolgus monkeys, and CD-1 mice, were purchased from Bioreclamation LLC (Westbury, NY). The test oligonucleotides were added to 1.2 mL aliquots of plasma at two concentrations (5 and 150 μg/mL). An aliquot (300 μL) of each spiked plasma sample was placed in a pre-conditioned filter unit and incubated at 37° C. for 30 minutes, immediately followed by centrifugation at 2000 g for 16 minutes. Aliquots of filtered and unfiltered spiked plasma samples were analyzed by an ELISA to determine the oligonucleotide concentration in each sample. Three replicates per concentration were used to determine the average percentage of bound and unbound oligonucleotide in each sample. The average concentration of the filtered sample relative to the concentration of the unfiltered sample is used to determine the percent of oligonucleotide in the plasma that is not bound to plasma proteins (% unbound). The final unbound oligonucleotide values are corrected for non-specific binding by dividing the % unbound by the % recovery for each oligonucleotide. The final % bound oligonucleotide values are determined by subtracting the final % unbound values from 100. The results are shown in Table 107 for the two concentrations of oligonucleotide tested (5 and 150 μg/mL) in each species of plasma. The results show that GalNAc conjugate groups do not have a significant impact on plasma protein binding. Furthermore, oligonucleotides with full PS internucleoside linkages and mixed PO/PS linkages both bind plasma proteins, and those with full PS linkages bind plasma proteins to a somewhat greater extent than those with mixed PO/PS linkages.

TABLE 107
Percent of modified oligonucleotide bound to plasma proteins

| | Human plasma | | Monkey plasma | | Mouse plasma | |
|---|---|---|---|---|---|---|
| ISIS | 5 | 150 | 5 | 150 | 5 | 150 |
| No. | μg/mL | μg/mL | μg/mL | μg/mL | μg/mL | μg/mL |
| 304801 | 99.2 | 98.0 | 99.8 | 99.5 | 98.1 | 97.2 |
| 663083 | 97.8 | 90.9 | 99.3 | 99.3 | 96.5 | 93.0 |
| 674450 | 96.2 | 97.0 | 98.6 | 94.4 | 94.6 | 89.3 |
| 494372 | 94.1 | 89.3 | 98.9 | 97.5 | 97.2 | 93.6 |
| 693401 | 93.6 | 89.9 | 96.7 | 92.0 | 94.6 | 90.2 |
| 681251 | 95.4 | 93.9 | 99.1 | 98.2 | 97.8 | 96.1 |
| 681257 | 93.4 | 90.5 | 97.6 | 93.7 | 95.6 | 92.7 |

### Example 97: Modified Oligonucleotides Targeting TTR Comprising a GalNAc₃ Conjugate Group

[1037] The oligonucleotides shown in Table 108 comprising a GalNAc conjugate were designed to target TTR.

TABLE 108
Modified oligonucleotides targeting TTR

| | | | | SEQ |
|---|---|---|---|---|
| ISIS | | GalNAc₃ | | ID |
| No. | Sequences (5′ to 3′) | Cluster | CM | No. |
| 666941 | GalNAc₃-3_{a-o′}A_{do}Tₑₛ^{m}CₑₛTₑₛTₑₛGₑₛ | GalNAc₃- | A_{d} | 2273 |
| | G_{ds}T_{ds}T_{ds}A_{ds}^{m}C_{ds}A_{ds}T_{ds}G_{ds}A_{ds}A_{ds}Aₑₛ | 3 | | |
| | Tₑₛ^{m}Cₑₛ^{m}Cₑₛ^{m}Cₑ | | | |
| 666942 | Tₑₛ^{m}CₑₒTₑₒTₑₒGₑₒG_{ds}T_{ds}T_{ds}A_{ds}^{m}C_{ds} | GalNAc₃- | A_{d} | 2270 |
| | A_{ds}T_{ds}G_{ds}A_{ds}A_{ds}AₑₒTₑₒ^{m}Cₑₛ^{m}Cₑₛ^{m}Cₑₒ | 1 | | |
| | Ad_{o′}-GalNAc₃-3ₐ | | | |
| 682876 | GalNAc₃-3_{a-o′}Tₑₛ^{m}CₑₛTₑₛTₑₛGₑₛG_{ds} | GalNAc₃- | PO | 2269 |
| | T_{ds}T_{ds}A_{ds}^{m}C_{ds}A_{ds}T_{ds}G_{ds}A_{ds}A_{ds}Aₑₛ | 3 | | |
| | Tₑₛ^{m}Cₑₛ^{m}Cₑₛ^{m}Cₑ | | | |
| 682877 | GalNAc₃-7_{a-o′}Tₑₛ^{m}CₑₛTₑₛTₑₛGₑₛG_{ds} | GalNAc₃- | PO | 2269 |
| | T_{ds}T_{ds}A_{ds}^{m}C_{ds}A_{ds}T_{ds}G_{ds}A_{ds}A_{ds}Aₑₛ | 7 | | |
| | Tₑₛ^{m}Cₑₛ^{m}Cₑₛ^{m}Cₑ | | | |
| 682878 | GalNAc₃-10_{a-o′}Tₑₛ^{m}CₑₛTₑₛTₑₛGₑₛ | GalNAc₃- | PO | 2269 |
| | G_{ds}T_{ds}T_{ds}A_{ds}^{m}C_{ds}A_{ds}T_{ds}G_{ds}A_{ds}A_{ds} | 10 | | |
| | AₑₛTₑₛ^{m}Cₑₛ^{m}Cₑₛ^{m}Cₑ | | | |
| 682879 | GalNAc₃-13_{a-o′}Tₑₛ^{m}CₑₛTₑₛTₑₛGₑₛ | GalNAc₃- | PO | 2269 |
| | G_{ds}T_{ds}T_{ds}A_{ds}^{m}C_{ds}A_{ds}T_{ds}G_{ds}A_{ds}A_{ds} | 13 | | |
| | AₑₛTₑₛ^{m}Cₑₛ^{m}Cₑₛ^{m}Cₑ | | | |
| 682880 | GalNAc₃-7_{a-o′}Tₑₛ^{m}CₑₛTₑₛTₑₛGₑₛ | GalNAc₃- | A_{d} | 2273 |
| | G_{ds}T_{ds}T_{ds}A_{ds}^{m}C_{ds}A_{ds}T_{ds}G_{ds}A_{ds}A_{ds} | 7 | | |
| | AₑₛTₑₛ^{m}Cₑₛ^{m}Cₑₛ^{m}Cₑ | | | |
| 682881 | GalNAc₃-10_{a-o′}Tₑₛ^{m}CₑₛTₑₛTₑₛGₑₛ | GalNAc₃- | A_{d} | 2273 |
| | G_{ds}T_{ds}T_{ds}A_{ds}^{m}C_{ds}A_{ds}T_{ds}G_{ds}A_{ds}A_{ds} | 10 | | |
| | AₑₛTₑₛ^{m}Cₑₛ^{m}Cₑₛ^{m}Cₑ | | | |
| 682882 | GalNAc₃-13_{a-o′}Tₑₛ^{m}CₑₛTₑₛTₑₛGₑₛ | GalNAc₃- | A_{d} | 2273 |
| | G_{ds}T_{ds}T_{ds}A_{ds}^{m}C_{ds}A_{ds}T_{ds}G_{ds}A_{ds}A_{ds} | 13 | | |
| | AₑₛTₑₛ^{m}Cₑₛ^{m}Cₑₛ^{m}Cₑ | | | |
| 684056 | Tₑₛ^{m}CₑₛTₑₛTₑₛGₑₛG_{ds}T_{ds}T_{ds}A_{ds}^{m}C_{ds} | GalNAc₃- | A_{d} | 2270 |
| | A_{ds}T_{ds}G_{ds}A_{ds}A_{ds}AₑₛTₑₛ^{m}Cₑₛ^{m}Cₑₛ^{m}Cₑₒ | 19 | | |
| | Ad_{o′}-GalNAc₃-19ₐ | | | |

[1038] The legend for Table 108 can be found in Example 74. The structure of GalNAc₃-1 was shown in Example 9. The structure of GalNAc₃-3ₐ was shown in Example 39. The structure of GalNAc₃-7ₐ was shown in Example 48. The structure of GalNAc₃-10ₐ was shown in Example 46. The structure of GalNAc₃-13ₐ was shown in Example 62. The structure of GalNAc₃-19ₐ was shown in Example 70.

### Example 98: Evaluation of Pro-Inflammatory Effects of Oligonucleotides Comprising a GalNAc Conjugate in hPMBC Assay

[1039] The oligonucleotides listed in Table 109 and were tested for pro-inflammatory effects in an hPMBC assay as described in Examples 23 and 24. (See Tables 30, 83, 95, and 108 for descriptions of the oligonucleotides.) ISIS 353512 is a high responder used as a positive control, and the other oligonucleotides are described in Tables 83, 95, and 108. The results shown in Table 109 were obtained using blood from one volunteer donor. The results show that the oligonucleotides comprising mixed PO/PS internucleoside linkages produced significantly lower pro-inflammatory responses compared to the same oligonucleotides having full PS linkages. Furthermore, the GalNAc conjugate group did not have a significant effect in this assay.

TABLE 109

| ISIS No. | Eₘₐₓ/EC₅₀ | GalNAc₃ cluster | Linkages | CM |
|---|---|---|---|---|
| 353512 | 3630 | n/a | PS | n/a |
| 420915 | 802 | n/a | PS | n/a |
| 682881 | 1311 | GalNAc₃-10 | PS | A_{d} |
| 682888 | 0.26 | GalNAc₃-10 | PO/PS | A_{d} |
| 684057 | 1.03 | GalNAc₃-19 | PO/PS | A_{d} |

### Example 99: Binding Affinities of Oligonucleotides Comprising a GalNAc Conjugate for the Asialoglycoprotein Receptor

[1040] The binding affinities of the oligonucleotides listed in Table 110 (see Table 76 for descriptions of the oligonucleotides) for the asialoglycoprotein receptor were tested in a competitive receptor binding assay. The competitor ligand, al-acid glycoprotein (AGP), was incubated in 50 mM sodium acetate buffer (pH 5) with 1 U neuraminidase-agarose for 16 hours at 37° C., and >90% desialylation was confirmed by either sialic acid assay or size exclusion chromatography (SEC). Iodine monochloride was used to iodinate the AGP according to the procedure by Atsma et al. (see J Lipid Res. 1991 January; 32(1):173-81.) In this method, desialylated al-acid glycoprotein (de-AGP) was added to 10 mM iodine chloride, Na¹²⁵I, and 1 M glycine in 0.25 M NaOH. After incubation for 10 minutes at room temperature, ¹²⁵I-labeled de-AGP was separated from free ¹²⁵I by concentrating the mixture twice utilizing a 3 KDMWCO spin column. The protein was tested for labeling efficiency and purity on a HPLC system equipped with an Agilent SEC-3 column (7.8×300 mm) and a B-RAM counter. Competition experiments utilizing ¹²⁵I-labeled de-AGP and various GalNAc-cluster containing ASOs were performed as follows. Human HepG2 cells (10⁶ cells/ml) were plated on 6-well plates in 2 ml of appropriate growth media. MEM media supplemented with 10% fetal bovine serum (FBS), 2 mM L-Glutamine and 10 mM HEPES was used. Cells were incubated 16-20 hours @ 37° C. with 5% and 10% CO₂ respectively. Cells were washed with media without FBS prior to the experiment. Cells were incubated for 30 min @37° C. with 1 ml competition mix containing appropriate growth media with 2% FBS, 10⁻⁸ M ¹²⁵I-labeled de-AGP and GalNAc-cluster containing ASOs at concentrations ranging from 10⁻¹¹ to 10⁻⁵ M. Non-specific binding was determined in the presence of 10⁻² M GalNAc sugar. Cells were washed twice with media without FBS to remove unbound ¹²⁵I-labeled de-AGP and competitor GalNAc ASO. Cells were lysed using Qiagen's RLT buffer containing 1% β-mercaptoethanol. Lysates were transferred to round bottom assay tubes after a brief 10 min freeze/thaw cycle and assayed on a γ-counter. Non-specific binding was subtracted before dividing ¹²⁵I protein counts by the value of the lowest GalNAc-ASO concentration counts. The inhibition curves were fitted according to a single site competition binding equation using a nonlinear regression algorithm to calculate the binding affinities (K_{D}'s).

[1041] The results in Table 110 were obtained from experiments performed on five different days. Results for oligonucleotides marked with superscript “a” are the average of experiments run on two different days. The results show that the oligonucleotides comprising a GalNAc conjugate group on the 5′-end bound the asialoglycoprotein receptor on human HepG2 cells with 1.5 to 16-fold greater affinity than the oligonucleotides comprising a GalNAc conjugate group on the 3′-end.

TABLE 110
Asialoglycoprotein receptor binding assay results

| | | Oligonucleotide end to | |
|---|---|---|---|
| | | which GalNAc conjugate | |
| ISIS No. | GalNAc conjugate | is attached | K_{D} (nM) |
| 661161^{a} | GalNAc₃-3 | 5′ | 3.7 |
| 666881^{a} | GalNAc₃-10 | 5′ | 7.6 |
| 666981 | GalNAc₃-7 | 5′ | 6.0 |
| 670061 | GalNAc₃-13 | 5′ | 7.4 |
| 655861^{a} | GalNAc₃-1 | 3′ | 11.6 |
| 677841^{a} | GalNAc₃-19 | 3′ | 60.8 |

### Example 100: Antisense Inhibition In Vivo by Oligonucleotides Comprising a GalNAc Conjugate Group Targeting Apo(a) In Vivo

[1042] The oligonucleotides listed in Table 111a below were tested in a single dose study for duration of action in mice.

TABLE 111a
Modified ASOs targeting APO(a)

| | | | | SEQ |
|---|---|---|---|---|
| ISIS | | GalNAc₃ | | ID |
| No. | Sequences (5′ to 3′) | Cluster | CM | No. |
| 681251 | GalNAc₃-7_{a-o′}TₑₛGₑₛ^{m}CₑₛTₑₛ^{m}Cₑₛ^{m} | GalNAc₃- | PO | 2281 |
| | C_{ds}G_{ds}T_{ds}T_{ds}G_{ds}G_{ds}T_{ds}G_{ds}^{m}C_{ds}T_{ds} | 7a | | |
| | TₑₛGₑₛTₑₛTₑₛ^{m}Cₑ | | | |
| 681257 | GalNAc₃-7_{a-o′}TₑₛGₑₒ^{m}CₑₒTₑₒ^{m}Cₑₒ^{m} | GalNAc₃- | PO | 2281 |
| | C_{ds}G_{ds}T_{ds}T_{ds}G_{ds}G_{ds}T_{ds}G_{ds}^{m}C_{ds}T_{ds} | 7a | | |
| | TₑₒGₑₒTₑₛTₑₛ^{m}Cₑ | | | |

[1043] The structure of GalNAc₃-7ₐ was shown in Example 48.

### Treatment

[1044] Female transgenic mice that express human Apo(a) were each injected subcutaneously once per week, for a total of 6 doses, with an oligonucleotide and dosage listed in Table 111b or with PBS. Each treatment group consisted of 3 animals. Blood was drawn the day before dosing to determine baseline levels of Apo(a) protein in plasma and at 72 hours, 1 week, and 2 weeks following the first dose. Additional blood draws will occur at 3 weeks, 4 weeks, 5 weeks, and 6 weeks following the first dose. Plasma Apo(a) protein levels were measured using an ELISA. The results in Table 111b are presented as the average percent of plasma Apo(a) protein levels for each treatment group, normalized to baseline levels (% BL), The results show that the oligonucleotides comprising a GalNAc conjugate group exhibited potent reduction in Apo(a) expression. This potent effect was observed for the oligonucleotide that comprises full PS internucleoside linkages and the oligonucleotide that comprises mixed PO and PS linkages.

TABLE 111b
Apo(a) plasma protein levels

| | | Apo(a) at | Apo(a) at | Apo(a) at |
|---|---|---|---|---|
| ISIS | Dosage | 72 hours | 1 week | 3 weeks |
| No. | (mg/kg) | (% BL) | (% BL) | (% BL) |
| PBS | n/a | 116 | 104 | 107 |
| 681251 | 0.3 | 97 | 108 | 93 |
| | 1.0 | 85 | 77 | 57 |
| | 3.0 | 54 | 49 | 11 |
| | 10.0 | 23 | 15 | 4 |
| 681257 | 0.3 | 114 | 138 | 104 |
| | 1.0 | 91 | 98 | 54 |
| | 3.0 | 69 | 40 | 6 |
| | 10.0 | 30 | 21 | 4 |

### Example 101: Antisense Inhibition by Oligonucleotides Comprising a GalNAc Cluster Linked Via a Stable Moiety

[1045] The oligonucleotides listed in Table 112 were tested for inhibition of mouse APOC-III expression in vivo. C57Bl/6 mice were each injected subcutaneously once with an oligonucleotide listed in Table 112 or with PBS. Each treatment group consisted of 4 animals. Each mouse treated with ISIS 440670 received a dose of 2, 6, 20, or 60 mg/kg. Each mouse treated with ISIS 680772 or 696847 received 0.6, 2, 6, or 20 mg/kg. The GalNAc conjugate group of ISIS 696847 is linked via a stable moiety, a phosphorothioate linkage instead of a readily cleavable phosphodiester containing linkage. The animals were sacrificed 72 hours after the dose. Liver APOC-III mRNA levels were measured using real-time PCR. APOC-III mRNA levels were normalized to cyclophilin mRNA levels according to standard protocols. The results are presented in Table 112 as the average percent of APOC-III mRNA levels for each treatment group relative to the saline control group. The results show that the oligonucleotides comprising a GalNAc conjugate group were significantly more potent than the oligonucleotide lacking a conjugate group. Furthermore, the oligonucleotide comprising a GalNAc conjugate group linked to the oligonucleotide via a cleavable moiety (ISIS 680772) was even more potent than the oligonucleotide comprising a GalNAc conjugate group linked to the oligonucleotide via a stable moiety (ISIS 696847).

TABLE 112
Modified oligonucleotides targeting mouse APOC-III

| | | | | APOC-III | |
|---|---|---|---|---|---|
| ISIS | | | Dosage | mRNA | SEQ |
| No. | Sequences (5′ to 3′) | CM | (mg/kg) | (% PBS) | ID No. |
| 440670 | ^{m}CₑₛAₑₛGₑₛ^{m}CₑₛTₑₛT_{ds}T_{ds}A_{ds}T_{ds}T_{ds}A_{ds}G_{ds}G_{ds}G_{ds}A_{ds}^{m} | n/a | 2 | 92 | 2275 |
| | CₑₛAₑₛGₑₛ^{m}CₑₛAₑ | | 6 | 86 | |
| | | | 20 | 59 | |
| | | | 60 | 37 | |
| 680772 | GalNAc₃-7_{a-o′}^{m}CₑₛAₑₛGₑₛ^{m}CₑₛTₑₛT_{ds}T_{ds}A_{ds}T_{ds}T_{ds} | PO | 0.6 | 79 | 2275 |
| | A_{ds}G_{ds}G_{ds}G_{ds}A_{ds}^{m}CₑₛAₑₛGₑₛ^{m}CₑₛAₑ | | 2 | 58 | |
| | | | 6 | 31 | |
| | | | 20 | 13 | |
| 696847 | GalNAc₃-7_{a-o′}^{m}CₑₛAₑₛGₑₛ^{m}CₑₛTₑₛT_{ds}T_{ds}A_{ds}T_{ds}T_{ds} | n/a | 0.6 | 83 | 2275 |
| | A_{ds}G_{ds}G_{ds}G_{ds}A_{ds}^{m}CₑₛAₑₛGₑₛ^{m}CₑₛAₑ | (PS) | 2 | 73 | |
| | | | 6 | 40 | |
| | | | 20 | 28 | |

The structure of GalNAc₃-7ₐ was shown in Example 48.

### Example 102: Distribution in Liver of Antisense Oligonucleotides Comprising a GalNAc Conjugate

[1046] The liver distribution of ISIS 353382 (see Table 36) that does not comprise a GalNAc conjugate and ISIS 655861 (see Table 36) that does comprise a GalNAc conjugate was evaluated. Male balb/c mice were subcutaneously injected once with ISIS 353382 or 655861 at a dosage listed in Table 113. Each treatment group consisted of 3 animals except for the 18 mg/kg group for ISIS 655861, which consisted of 2 animals. The animals were sacrificed 48 hours following the dose to determine the liver distribution of the oligonucleotides. In order to measure the number of antisense oligonucleotide molecules per cell, a Ruthenium (II) tris-bipyridine tag (MSD TAG, Meso Scale Discovery) was conjugated to an oligonucleotide probe used to detect the antisense oligonucleotides. The results presented in Table 113 are the average concentrations of oligonucleotide for each treatment group in units of millions of oligonucleotide molecules per cell. The results show that at equivalent doses, the oligonucleotide comprising a GalNAc conjugate was present at higher concentrations in the total liver and in hepatocytes than the oligonucleotide that does not comprise a GalNAc conjugate. Furthermore, the oligonucleotide comprising a GalNAc conjugate was present at lower concentrations in non-parenchymal liver cells than the oligonucleotide that does not comprise a GalNAc conjugate. And while the concentrations of ISIS 655861 in hepatocytes and non-parenchymal liver cells were similar per cell, the liver is approximately 80% hepatocytes by volume. Thus, the majority of the ISIS 655861 oligonucleotide that was present in the liver was found in hepatocytes, whereas the majority of the ISIS 353382 oligonucleotide that was present in the liver was found in non-parenchymal liver cells.

TABLE 113

| | | Concentration | | Concentration in |
|---|---|---|---|---|
| | | in whole | Concentration in | non-parenchymal |
| | | liver | hepatocytes | liver cells |
| ISIS | Dosage | (molecules*10\hat{ }6 | (molecules*10\hat{ }6 | (molecules*10\hat{ }6 |
| No. | (mg/kg) | per cell) | per cell) | per cell) |
| 353382 | 3 | 9.7 | 1.2 | 37.2 |
| | 10 | 17.3 | 4.5 | 34.0 |
| | 20 | 23.6 | 6.6 | 65.6 |
| | 30 | 29.1 | 11.7 | 80.0 |
| | 60 | 73.4 | 14.8 | 98.0 |
| | 90 | 89.6 | 18.5 | 119.9 |
| 655861 | 0.5 | 2.6 | 2.9 | 3.2 |
| | 1 | 6.2 | 7.0 | 8.8 |
| | 3 | 19.1 | 25.1 | 28.5 |
| | 6 | 44.1 | 48.7 | 55.0 |
| | 18 | 76.6 | 82.3 | 77.1 |

### Example 103: Duration of Action In Vivo of Oligonucleotides Targeting APOC-III Comprising a GaNAC₃ Conjugate

[1047] The oligonucleotides listed in Table 114 below were tested in a single dose study for duration of action in mice.

TABLE 114
Modified ASOs targeting APOC-III

| | | | | SEQ |
|---|---|---|---|---|
| ISIS | | GalNAc₃ | | ID |
| No. | Sequences (5′ to 3′) | Cluster | CM | No. |
| 304801 | AₑₛGₑₛ^{m}CₑₛTₑₛTₑₛ^{m}C_{ds}T_{ds}T_{ds}G_{ds}T_{ds}^{m} | n/a | n/a | 2248 |
| | C_{ds}^{m}C_{ds}A_{ds}G_{ds}^{m}C_{ds}TₑₛTₑₛTₑₛAₑₛTₑ | | | |
| 663084 | GalNAc₃-3_{a-o′}AₑₛGₑₒ^{m}CₑₒTₑₒTₑₒ^{m} | GalNAc₃- | Ad | 2264 |
| | C_{ds}T_{ds}T_{ds}G_{ds}T_{ds}C_{ds}^{m}C_{ds}A_{ds}G_{ds}^{m}C_{ds} | 3a | | |
| | TₑₒTₑₒTₑₛAₑₛTₑ | | | |
| 679241 | AₑₛGₑₒ^{m}CₑₒTₑₒTₑₒ^{m}C_{ds}T_{ds}T_{ds}G_{ds}T_{ds}^{m} | GalNAc₃- | Ad | 2249 |
| | C_{ds}^{m}C_{ds}A_{ds}G_{ds}^{m}C_{ds}TₑₒTₑₒTₑₛAₑₛTₑₒ | 19a | | |
| | A_{do′}-GalNAc₃-19ₐ | | | |

[1048] The structure of GalNAc₃-3ₐ was shown in Example 39, and GalNAc₃-19ₐ was shown in Example 70.

### Treatment

[1049] Female transgenic mice that express human APOC-111 were each injected subcutaneously once with an oligonucleotide listed in Table 114 or with PBS. Each treatment group consisted of 3 animals. Blood was drawn before dosing to determine baseline and at 3, 7, 14, 21, 28, 35, and 42 days following the dose. Plasma triglyceride and APOC-111 protein levels were measured as described in Example 20. The results in Table 115 are presented as the average percent of plasma triglyceride and APOC-111 levels for each treatment group, normalized to baseline levels. A comparison of the results in Table 71 of example 79 with the results in Table 115 below show that oligonucleotides comprising a mixture of phosphodiester and phosphorothioate internucleoside linkages exhibited increased duration of action than equivalent oligonucleotides comprising only phosphorothioate internucleoside linkages.

TABLE 115
Plasma triglyceride and APOC-III protein levels in transgenic mice

| | | Time | | | | |
|---|---|---|---|---|---|---|
| | | point | Triglyc- | APOC-III | | |
| | | (days | erides | protein | | |
| ISIS | Dosage | post- | (% | (% | GalNAc₃ | |
| No. | (mg/kg) | dose) | baseline) | baseline) | Cluster | CM |
| PBS | n/a | 3 | 96 | 101 | n/a | n/a |
| | | 7 | 88 | 98 | | |
| | | 14 | 91 | 103 | | |
| | | 21 | 69 | 92 | | |
| | | 28 | 83 | 81 | | |
| | | 35 | 65 | 86 | | |
| | | 42 | 72 | 88 | | |
| 304801 | 30 | 3 | 42 | 46 | n/a | n/a |
| | | 7 | 42 | 51 | | |
| | | 14 | 59 | 69 | | |
| | | 21 | 67 | 81 | | |
| | | 28 | 79 | 76 | | |
| | | 35 | 72 | 95 | | |
| | | 42 | 82 | 92 | | |
| 663084 | 10 | 3 | 35 | 28 | GalNAc₃-3a | A_{d} |
| | | 7 | 23 | 24 | | |
| | | 14 | 23 | 26 | | |
| | | 21 | 23 | 29 | | |
| | | 28 | 30 | 22 | | |
| | | 35 | 32 | 36 | | |
| | | 42 | 37 | 47 | | |
| 679241 | 10 | 3 | 38 | 30 | GalNAc₃-19a | A_{d} |
| | | 7 | 31 | 28 | | |
| | | 14 | 30 | 22 | | |
| | | 21 | 36 | 34 | | |
| | | 28 | 48 | 34 | | |
| | | 35 | 50 | 45 | | |
| | | 42 | 72 | 64 | | |

### Example 104: Synthesis of oligonucleotides comprising a 5′-GalNAc₂ conjugate

[chemical structure]

[chemical structure]

[1050] Compound 120 is commercially available, and the synthesis of compound 126 is described in Example 49. Compound 120 (1 g, 2.89 mmol), HBTU (0.39 g, 2.89 mmol), and HOBt (1.64 g, 4.33 mmol) were dissolved in DMF (10 mL, and N,N-diisopropylethylamine (1.75 mL, 10.1 mmol) were added. After about 5 min, aminohexanoic acid benzyl ester (1.36 g, 3.46 mmol) was added to the reaction. After 3 h, the reaction mixture was poured into 100 mL of 1 M NaHSO4 and extracted with 2×50 mL ethyl acetate. Organic layers were combined and washed with 3×40 mL sat NaHCO₃ and 2×brine, dried with Na₂SO₄, filtered and concentrated. The product was purified by silica gel column chromatography (DCM:EA:Hex, 1:1:1) to yield compound 231. LCMS and NMR were consistent with the structure. Compounds 231 (1.34 g, 2.438 mmol) was dissolved in dichloromethane (10 mL) and trifluoracetic acid (10 mL) was added. After stirring at room temperature for 2 h, the reaction mixture was concentrated under reduced pressure and co-evaporated with toluene (3×10 mL). The residue was dried under reduced pressure to yield compound 232 as the trifluoracetate salt. The synthesis of compound 166 is described in Example 54. Compound 166 (3.39 g, 5.40 mmol) was dissolved in DMF (3 mL). A solution of compound 232 (1.3 g, 2.25 mmol) was dissolved in DMF (3 mL) and N,N-diisopropylethylamine (1.55 mL) was added. The reaction was stirred at room temperature for 30 minutes, then poured into water (80 mL) and the aqueous layer was extracted with EtOAc (2×100 mL). The organic phase was separated and washed with sat. aqueous NaHCO₃ (3×80 mL), 1 M NaHSO₄ (3×80 mL) and brine (2×80 mL), then dried (Na₂SO₄), filtered, and concentrated. The residue was purified by silica gel column chromatography to yield compound 233. LCMS and NMR were consistent with the structure. Compound 233 (0.59 g, 0.48 mmol) was dissolved in methanol (2.2 mL) and ethyl acetate (2.2 mL). Palladium on carbon (10 wt % Pd/C, wet, 0.07 g) was added, and the reaction mixture was stirred under hydrogen atmosphere for 3 h. The reaction mixture was filtered through a pad of Celite and concentrated to yield the carboxylic acid. The carboxylic acid (1.32 g, 1.15 mmol, cluster free acid) was dissolved in DMF (3.2 mL). To this N,N-diisopropylethylamine (0.3 mL, 1.73 mmol) and PFPTFA (0.30 mL, 1.73 mmol) were added. After 30 min stirring at room temperature the reaction mixture was poured into water (40 mL) and extracted with EtOAc (2×50 mL). A standard work-up was completed as described above to yield compound 234. LCMS and NMR were consistent with the structure. Oligonucleotide 235 was prepared using the general procedure described in Example 46. The GalNAc₂ cluster portion (GalNAc₂-24ₐ) of the conjugate group GalNAc₂-24 can be combined with any cleavable moiety present on the oligonucleotide to provide a variety of conjugate groups. The structure of GalNc₂-24 (GalNAc₂-24ₐ-CM) is shown below.

[chemical structure]

### Example 105: Synthesis of Oligonucleotides Comprising a GalNAc₁-25 Conjugate

[chemical structure]

[1051] The synthesis of compound 166 is described in Example 54. Oligonucleotide 236 was prepared using the general procedure described in Example 46.

[1052] Alternatively, oligonucleotide 236 was synthesized using the scheme shown below, and compound 238 was used to form the oligonucleotide 236 using procedures described in Example 10.

[chemical structure]

[1053] The GalNAc₁ cluster portion (GalNAc₁-25ₐ) of the conjugate group GalNAc₁-25 can be combined with any cleavable moiety present on the oligonucleotide to provide a variety of conjugate groups. The structure of GalNAc₁-25 (GalNAc₁-25ₐ-CM) is shown below:

[chemical structure]

### Example 106: Antisense Inhibition In Vivo by Oligonucleotides Targeting SRB-1 Comprising a 5′-GalNAc₂ or a 5′-GalNAc₃ Conjugate

[1054] Oligonucleotides listed in Tables 116 and 117 were tested in dose-dependent studies for antisense inhibition of SRB-1 in mice.

### Treatment

[1055] Six to week old, male C57BL/6 mice (Jackson Laboratory, Bar Harbor, ME) were injected subcutaneously once with 2, 7, or 20 mg/kg of ISIS No. 440762; or with 0.2, 0.6, 2, 6, or 20 mg/kg of ISIS No. 686221, 686222, or 708561; or with saline. Each treatment group consisted of 4 animals. The mice were sacrificed 72 hours following the final administration. Liver SRB-1 mRNA levels were measured using real-time PCR. SRB-1 mRNA levels were normalized to cyclophilin mRNA levels according to standard protocols. The antisense oligonucleotides lowered SRB-1 mRNA levels in a dose-dependent manner, and the ED₅₀ results are presented in Tables 116 and 117. Although previous studies showed that trivalent GalNAc-conjugated oligonucleotides were significantly more potent than divalent GalNAc-conjugated oligonucleotides, which were in turn significantly more potent than monovalent GalNAc conjugated oligonucleotides (see, e.g., Khorev et al., Bioorg. & Med. Chem., Vol. 16, 5216-5231 (2008)), treatment with antisense oligonucleotides comprising monovalent, divalent, and trivalent GalNAc clusters lowered SRB-1 mRNA levels with similar potencies as shown in Tables 116 and 117.

TABLE 116
Modified oligonucleotides targeting SRB-1

| | | | ED₅₀ | SEQ |
|---|---|---|---|---|
| ISIS | | GalNAc | (mg/ | ID |
| No. | Sequences (5′ to 3′) | Cluster | kg) | No |
| 440762 | Tₖₛ^{m}CₖₛA_{ds}G_{ds}T_{ds}^{m}C_{ds}A_{ds}T_{ds}G_{ds} | n/a | 4.7 | 2250 |
| | A_{ds}^{m}C_{ds}T_{ds}Tₖₛ^{m}Ck | | | |
| 686221 | GalNAc2-24_{a-o′}A_{do}Tₖₛ^{m}CₖₛA_{ds} | GalNAc₃- | 0.39 | 2254 |
| | G_{ds}T_{ds}^{m}C_{ds}A_{ds}T_{ds}G_{ds}A_{ds}^{m}C_{ds}T_{ds} | 24ₐ | | |
| | Tₖₛ^{m}Cₖ | | | |
| 686222 | GalNAc₃-13_{a-o′}A_{do}Tₖₛ^{m}CₖₛA_{ds} | GalNAc₃- | 0.41 | 2254 |
| | G_{ds}T_{ds}^{m}C_{ds}A_{ds}T_{ds}G_{ds}A_{ds}^{m}C_{ds}T_{ds} | 13ₐ | | |
| | Tₖₛ^{m}Cₖ | | | |

[1056] See Example 93 for table legend. The structure of GalNAc3-13a was shown in Example 62, and the structure of GalNAc2-24a was shown in Example 104.

TABLE 117
Modified oligonucleotides targeting SRB-1

| | | | ED50 | SEQ |
|---|---|---|---|---|
| ISIS | | GalNAc | (mg/ | ID |
| No. | Sequences (5′ to 3′) | Cluster | kg) | No |
| 440762 | Tₖₛ^{m}CₖₛA_{ds}G_{ds}T_{ds}^{m}C_{ds}A_{ds}T_{ds}G_{ds} | n/a | 5 | 2250 |
| | A_{ds}^{m}C_{ds}T_{ds}Tₖₛ^{m}Cₖ | | | |
| 708561 | GalNAc₁-25_{a-o′}Tₖₛ^{m}CₖₛA_{ds}G_{ds} | GalNAc₁- | 0.4 | 2250 |
| | T_{ds}^{m}C_{ds}A_{ds}T_{ds}G_{ds}A_{ds}^{m}C_{ds}T_{ds}Tₖₛ^{m} | 25ₐ | | |
| | Cₖ | | | |

See Example 93 for table legend. The structure of GalNAc₁-25a was shown in Example 105.

[1057] The concentrations of the oligonucleotides in Tables 116 and 117 in liver were also assessed, using procedures described in Example 75. The results shown in Tables 117a and 117b below are the average total antisense oligonucleotide tissues levels for each treatment group, as measured by UV in units of μg oligonucleotide per gram of liver tissue. The results show that the oligonucleotides comprising a GalNAc conjugate group accumulated in the liver at significantly higher levels than the same dose of the oligonucleotide lacking a GalNAc conjugate group. Furthermore, the antisense oligonucleotides comprising one, two, or three GalNAc ligands in their respective conjugate groups all accumulated in the liver at similar levels. This result is surprising in view of the Khorev et al. literature reference cited above and is consistent with the activity data shown in Tables 116 and 117 above.

TABLE 117a
Liver concentrations of oligonucleotides
comprising a GalNAc₂ or GalNAc₃ conjugate group

| | Dosage | [Antisense | GalNAc | |
|---|---|---|---|---|
| ISIS No. | (mg/kg) | oligonucleotide] (μg/g) | cluster | CM |
| 440762 | 2 | 2.1 | n/a | n/a |
| | 7 | 13.1 | | |
| | 20 | 31.1 | | |
| 686221 | 0.2 | 0.9 | GalNAc₂-24ₐ | A_{d} |
| | 0.6 | 2.7 | | |
| | 2 | 12.0 | | |
| | 6 | 26.5 | | |
| 686222 | 0.2 | 0.5 | GalNAc₃-13ₐ | A_{d} |
| | 0.6 | 1.6 | | |
| | 2 | 11.6 | | |
| | 6 | 19.8 | | |

TABLE 117b
Liver concentrations of oligonucleotides
comprising a GalNAc₁ conjugate group

| | Dosage | [Antisense | | |
|---|---|---|---|---|
| ISIS No. | (mg/kg) | oligonucleotide] (μg/g) | GalNAc cluster | CM |
| 440762 | 2 | 2.3 | n/a | n/a |
| | 7 | 8.9 | | |
| | 20 | 23.7 | | |
| 708561 | 0.2 | 0.4 | GalNAc₁-25ₐ | PO |
| | 0.6 | 1.1 | | |
| | 2 | 5.9 | | |
| | 6 | 23.7 | | |
| | 20 | 53.9 | | |

### Example 107: Synthesis of Oligonucleotides Comprising a GalNAc₁-26 or GalNAc₁-27 Conjugate

[chemical structure]

[1058] Oligonucleotide 239 is synthesized via coupling of compound 47 (see Example 15) to acid 64 (see Example 32) using HBTU and DIEA in DMF. The resulting amide containing compound is phosphitylated, then added to the 5′-end of an oligonucleotide using procedures described in Example 10. The GalNAc₁ cluster portion (GalNAc₁-26ₐ) of the conjugate group GalNAc₁-26 can be combined with any cleavable moiety present on the oligonucleotide to provide a variety of conjugate groups. The structure of GalNAc₁-26 (GalNAc₁-26ₐ-CM) is shown below:

[chemical structure]

[1059] In order to add the GalNAc₁ conjugate group to the 3′-end of an oligonucleotide, the amide formed from the reaction of compounds 47 and 64 is added to a solid support using procedures described in Example 7. The oligonucleotide synthesis is then completed using procedures described in Example 9 in order to form oligonucleotide 240.

[chemical structure]

[1060] The GalNAc₁ cluster portion (GalNAc₁-27ₐ) of the conjugate group GalNAc₁-27 can be combined with any cleavable moiety present on the oligonucleotide to provide a variety of conjugate groups. The structure of GalNAc₁-27 (GalNAc₁-27ₐ-CM) is shown below:

[chemical structure]

### Example 108: Antisense Inhibition In Vivo by Oligonucleotides Comprising a GalNAc Conjugate Group Targeting Apo(a) In Vivo

[1061] The oligonucleotides listed in Table 118 below were tested in a single dose study in mice.

TABLE 118
Modified ASOs targeting APO(a)

| | | | | SEQ |
|---|---|---|---|---|
| ISIS | | GalNAc₃ | | ID |
| No. | Sequences (5′ to 3′) | Cluster | CM | No. |
| 494372 | TₑₛGₑₛ^{m}CₑₛTₑₛ^{m}Cₑₛ^{m}C_{ds}G_{ds}T_{ds}T_{ds}G_{ds} | n/a | n/a | 2281 |
| | G_{ds}T_{ds}G_{ds}^{m}C_{ds}T_{ds}TₑₛGₑₛTₑₛTₑₛ^{m}Cₑ | | | |
| 681251 | GalNAc₃-7_{a-o′}TₑₛGₑₛ^{m}CₑₛTₑₛ^{m}Cₑₛ^{m} | GalNAc₃- | PO | 2281 |
| | C_{ds}G_{ds}T_{ds}T_{ds}G_{ds}G_{ds}T_{ds}G_{ds}^{m}C_{ds}T_{ds} | 7a | | |
| | TₑₛGₑₛTₑₛTₑₛ^{m}Cₑ | | | |
| 681255 | GalNAc₃-3_{a-o′}TₑₛGₑₒ^{m}CₑₒTₑₒ^{m}Cₑₒ^{m} | GalNAc₃- | PO | 2281 |
| | C_{ds}G_{ds}T_{ds}T_{ds}G_{ds}G_{ds}T_{ds}G_{ds}^{m}C_{ds}T_{ds} | 3a | | |
| | TₑₒGₑₒTₑₛTₑₛ^{m}Cₑ | | | |
| 681256 | GalNAc₃-10_{a-o′}TₑₛGₑₒ^{m}CₑₒTₑₒ^{m} | GalNAc₃- | PO | 2281 |
| | Cₑₒ^{m}C_{ds}G_{ds}T_{ds}T_{ds}G_{ds}G_{ds}T_{ds}G_{ds}^{m}C_{ds} | 10a | | |
| | T_{ds}TₑₒGₑₒTₑₛTₑₛ^{m}Cₑ | | | |
| 681257 | GalNAc₃-7_{a-o′}TₑₛGₑₒ^{m}CₑₒTₑₒ^{m} | GalNAc₃- | PO | 2281 |
| | Cₑₒ^{m}C_{ds}G_{ds}T_{ds}T_{ds}G_{ds}G_{ds}T_{ds}G_{ds}^{m}C_{ds} | 7a | | |
| | T_{ds}TₑₒGₑₒTₑₛTₑₛ^{m}Cₑ | | | |
| 681258 | GalNAc₃-13_{a-o′}TₑₛGₑₒ^{m}CₑₒTₑₒ^{m} | GalNAc₃- | PO | 2281 |
| | Cₑₒ^{m}C_{ds}G_{ds}T_{ds}T_{ds}G_{ds}G_{ds}T_{ds}G_{ds}^{m}C_{ds} | 13a | | |
| | T_{ds}TₑₒGₑₒTₑₛTₑₛ^{m}Cₑ | | | |
| 681260 | TₑₛGₑₒ^{m}CₑₒTₑₒ^{m}Cₑₒ^{m}C_{ds}G_{ds}T_{ds}T_{ds}G_{ds} | GalNAc₃- | A_{d} | 2280 |
| | G_{ds}T_{ds}G_{ds}^{m}C_{ds}T_{ds}TₑₒGₑₒTₑₛTₑₛ^{m}Cₑₒ | 19a | | |
| | A_{do′}-GalNAc₃-19 | | | |

[1062] The structure of GalNAc₃-1ₐ was shown in Example 48.

### Treatment

[1063] Male transgenic mice that express human Apo(a) were each injected subcutaneously once with an oligonucleotide and dosage listed in Table 119 or with PBS. Each treatment group consisted of 4 animals. Blood was drawn the day before dosing to determine baseline levels of Apo(a) protein in plasma and at 1 week following the first dose. Additional blood draws will occur weekly for approximately 8 weeks. Plasma Apo(a) protein levels were measured using an ELISA. The results in Table 119 are presented as the average percent of plasma Apo(a) protein levels for each treatment group, normalized to baseline levels (% BL), The results show that the antisense oligonucleotides reduced Apo(a) protein expression. Furthermore, the oligonucleotides comprising a GalNAc conjugate group exhibited even more potent reduction in Apo(a) expression than the oligonucleotide that does not comprise a conjugate group.

TABLE 119
Apo(a) plasma protein levels

| | | Apo(a) at 1 week |
|---|---|---|
| ISIS No. | Dosage (mg/kg) | (% BL) |
| PBS | n/a | 143 |
| 494372 | 50 | 58 |
| 681251 | 10 | 15 |
| 681255 | 10 | 14 |
| 681256 | 10 | 17 |
| 681257 | 10 | 24 |
| 681258 | 10 | 22 |
| 681260 | 10 | 26 |

### Example 109: Synthesis of Oligonucleotides Comprising a GalNAc₁-28 or GalNAc₁-29 Conjugate

[chemical structure]

[1064] Oligonucleotide 241 is synthesized using procedures similar to those described in Example 71 to form the phosphoramidite intermediate, followed by procedures described in Example 10 to synthesize the oligonucleotide. The GalNAc₁ cluster portion (GalNAc₁-28ₐ) of the conjugate group GalNAc₁-28 can be combined with any cleavable moiety present on the oligonucleotide to provide a variety of conjugate groups. The structure of GalNAc₁-28 (GalNAc₁-28ₐ-CM) is shown below:

[chemical structure]

[1065] In order to add the GalNAc₁ conjugate group to the 3′-end of an oligonucleotide, procedures similar to those described in Example 71 are used to form the hydroxyl intermediate, which is then added to the solid support using procedures described in Example 7. The oligonucleotide synthesis is then completed using procedures described in Example 9 in order to form oligonucleotide 242.

[chemical structure]

[1066] The GalNAc₁ cluster portion (GalNAc₁-29ₐ) of the conjugate group GalNAc₁-29 can be combined with any cleavable moiety present on the oligonucleotide to provide a variety of conjugate groups. The structure of GalNAc₁-29 (GalNAc₁-29ₐ-CM) is shown below:

[chemical structure]

### Example 110: Synthesis of Oligonucleotides Comprising a GalNAc₁-30 Conjugate

[chemical structure]

[1067] Oligonucleotide 246 comprising a GalNAc₁-30 conjugate group, wherein Y is selected from O, S, a substituted or unsubstituted C₁-C₁₀ alkyl, amino, substituted amino, azido, alkenyl or alkynyl, is synthesized as shown above. The GalNAc₁ cluster portion (GalNAc₁-30ₐ) of the conjugate group GalNAc₁-30 can be combined with any cleavable moiety to provide a variety of conjugate groups. In certain embodiments, Y is part of the cleavable moiety. In certain embodiments, Y is part of a stable moiety, and the cleavable moiety is present on the oligonucleotide. The structure of GalNAc₁-30ₐ is shown below:

[chemical structure]

### Example 111: Synthesis of Oligonucleotides Comprising a GalNAc₂-31 or GalNAc₂-32 Conjugate

[chemical structure]

[1068] Oligonucleotide 250 comprising a GalNAc₂-31 conjugate group, wherein Y is selected from O, S, a substituted or unsubstituted C₁-C₁₀ alkyl, amino, substituted amino, azido, alkenyl or alkynyl, is synthesized as shown above. The GalNAc₂ cluster portion (GalNAc₂-31ₐ) of the conjugate group GalNAc₂-31 can be combined with any cleavable moiety to provide a variety of conjugate groups. In certain embodiments, the Y-containing group directly adjacent to the 5′-end of the oligonucleotide is part of the cleavable moiety. In certain embodiments, the Y-containing group directly adjacent to the 5′-end of the oligonucleotide is part of a stable moiety, and the cleavable moiety is present on the oligonucleotide. The structure of GalNAc₂-31ₐ is shown below:

[chemical structure]

[1069] The synthesis of an oligonucleotide comprising a GalNAc₂-32 conjugate is shown below.

[chemical structure]

[1070] Oligonucleotide 252 comprising a GalNAc₂-32 conjugate group, wherein Y is selected from O, S, a substituted or unsubstituted C₁-C₁₀ alkyl, amino, substituted amino, azido, alkenyl or alkynyl, is synthesized as shown above. The GalNAc₂ cluster portion (GalNAc₂-32ₐ) of the conjugate group GalNAc₂-32 can be combined with any cleavable moiety to provide a variety of conjugate groups. In certain embodiments, the Y-containing group directly adjacent to the 5′-end of the oligonucleotide is part of the cleavable moiety. In certain embodiments, the Y-containing group directly adjacent to the 5′-end of the oligonucleotide is part of a stable moiety, and the cleavable moiety is present on the oligonucleotide. The structure of GalNAc₂-32ₐ is shown below:

[chemical structure]

### Example 112: Modified oligonucleotides comprising a GalNAc₁ conjugate

[1071] The oligonucleotides in Table 120 targeting SRB-1 were synthesized with a GalNAc₁ conjugate group in order to further test the potency of oligonucleotides comprising conjugate groups that contain one GalNAc ligand.

TABLE 120

| | | | | SEQ |
|---|---|---|---|---|
| ISIS | | GalNAc | | ID |
| No. | Sequence (5′ to 3′) | cluster | CM | NO. |
| 711461 | GalNAc₁-25_{a-o′}A_{do}Gₑₛ^{m}CₑₛTₑₛTₑₛ^{m} | GalNAc₁- | A_{d} | 2258 |
| | CₑₛA_{ds}G_{ds}T_{ds}^{m}C_{ds}A_{ds}T_{ds}G_{ds}A_{ds}^{m}C_{ds} | 25ₐ | | |
| | T_{ds}Tₑₛ^{m}Cₑₛ^{m}CₑₛTₑₛTₑ | | | |
| 711462 | GalNAc₁-25_{a-o′}Gₑₛ^{m}CₑₛTₑₛTₑₛ^{m}Cₑₛ | GalNAc₁- | PO | 2256 |
| | A_{ds}G_{ds}T_{ds}^{m}C_{ds}A_{ds}T_{ds}G_{ds}A_{ds}^{m}C_{ds}T_{ds} | 25ₐ | | |
| | Tₑₛ^{m}Cₑₛ^{m}CₑₛTₑₛTₑ | | | |
| 711463 | GalNAc₁-25_{a-o′}Gₑₛ^{m}CₑₒTₑₒTₑₒ^{m}Cₑₒ | GalNAc₁- | PO | 2256 |
| | A_{ds}G_{ds}T_{ds}^{m}C_{ds}A_{ds}T_{ds}G_{ds}A_{ds}^{m}C_{ds}T_{ds} | 25ₐ | | |
| | Tₑₒ^{m}Cₑₒ^{m}CₑₛTₑₛTₑ | | | |
| 711465 | GalNAc₁-26_{a-o′}A_{do}Gₑₛ^{m}CₑₛTₑₛTₑₛ^{m} | GalNAc₁- | A_{d} | 2258 |
| | CₑₛA_{ds}G_{ds}T_{ds}^{m}C_{ds}A_{ds}T_{ds}GdsA_{ds}^{m}C_{ds} | 26ₐ | | |
| | T_{ds}Tₑₛ^{m}Cₑₛ^{m}CₑₛTₑₛTₑ | | | |
| 711466 | GalNAc₁-26_{a-o′}Gₑₛ^{m}CₑₛTₑₛTₑₛ^{m}Cₑₛ | GalNAc₁- | PO | 2256 |
| | A_{ds}G_{ds}T_{ds}^{m}C_{ds}A_{ds}T_{ds}G_{ds}A_{ds}^{m}C_{ds}T_{ds} | 26ₐ | | |
| | Tₑₛ^{m}Cₑₛ^{m}CₑₛTₑₛTₑ | | | |
| 711467 | GalNAc₁-26_{a-o′}Gₑₛ^{m}CₑₒTₑₒTₑₒ^{m}Cₑₒ | GalNAc₁- | PO | 2256 |
| | A_{ds}G_{ds}T_{ds}^{m}C_{ds}A_{ds}T_{ds}G_{ds}A_{ds}^{m}C_{ds}T_{ds} | 26ₐ | | |
| | Tₑₒ^{m}Cₑₒ^{m}CₑₛTₑₛTₑ | | | |
| 711468 | GalNAc₁-28_{a-o′}A_{do}Gₑₛ^{m}CₑₛTₑₛTₑₛ^{m} | GalNAc₁- | A_{d} | 2258 |
| | CₑₛA_{ds}G_{ds}T_{ds}^{m}C_{ds}A_{ds}T_{ds}G_{ds}A_{ds}^{m}C_{ds} | 28ₐ | | |
| | T_{ds}Tₑₛ^{m}Cₑₛ^{m}CₑₛTₑₛTₑ | | | |
| 711469 | GalNAc₁-28_{a-o′}Gₑₛ^{m}CₑₛTₑₛTₑₛ^{m}Cₑₛ | GalNAc₁- | PO | 2256 |
| | A_{ds}G_{ds}T_{ds}^{m}C_{ds}A_{ds}T_{ds}G_{ds}A_{ds}^{m}C_{ds}T_{ds} | 28ₐ | | |
| | Tₑₛ^{m}Cₑₛ^{m}CₑₛTₑₛTₑ | | | |
| 711470 | GalNAc₁-28_{a-o′}Gₑₛ^{m}CₑₒTₑₒTₑₒ^{m}Cₑₒ | GalNAc₁- | PO | 2256 |
| | A_{ds}G_{ds}T_{ds}^{m}C_{ds}A_{ds}T_{ds}G_{ds}A_{ds}^{m}C_{ds}T_{ds} | 28ₐ | | |
| | Tₑₒ^{m}Cₑₒ^{m}CₑₛTₑₛTₑ | | | |
| 713844 | Gₑₛ^{m}CₑₛTₑₛTₑₛ^{m}CₑₛA_{ds}G_{ds}T_{ds}^{m}C_{ds}A_{ds} | GalNAc₁- | PO | 2256 |
| | T_{ds}G_{ds}A_{ds}^{m}C_{ds}T_{ds}Tₑₛ^{m}Cₑₛ^{m}CₑₛTₑₛ | 27ₐ | | |
| | T_{eo′-}GalNAc₁-27_{-o′} | | | |
| 713845 | Gₑₛ^{m}CₑₒTₑₒTₑₒ^{m}CₑₒA_{ds}G_{ds}T_{ds}^{m}C_{ds}A_{ds} | GalNAc₁- | PO | 2256 |
| | T_{ds}G_{ds}A_{ds}^{m}C_{ds}T_{ds}Tₑₒ^{m}Cₑₒ^{m}CₑₛTₑₛ | 27ₐ | | |
| | T_{eo′-}GalNAc₁-27_{a-o′} | | | |
| 713846 | Gₑₛ^{m}CₑₒTₑₒTₑₒ^{m}CₑₒA_{ds}G_{ds}T_{ds}^{m}C_{ds}A_{ds} | GalNAc₁- | A_{d} | 2257 |
| | T_{ds}G_{ds}A_{ds}^{m}C_{ds}T_{ds}Tₑₒ^{m}Cₑₒ^{m}CₑₛTₑₛTₑₒ | 27ₐ | | |
| | A_{do′}-GalNAc₁-27ₐ | | | |
| 713847 | Gₑₛ^{m}CₑₛTₑₛTₑₛ^{m}CₑₛA_{ds}G_{ds}T_{ds}^{m}C_{ds}A_{ds} | GalNAc₁- | PO | 2256 |
| | T_{ds}G_{ds}A_{ds}^{m}C_{ds}T_{ds}Tₑₛ^{m}Cₑₛ^{m}CₑₛTₑₛ | 29ₐ | | |
| | T_{eo′-}GalNAc₁-29_{-o′} | | | |
| 713848 | Gₑₛ^{m}CₑₒTₑₒTₑₒ^{m}CₑₒA_{ds}G_{ds}T_{ds}^{m}C_{ds}A_{ds} | GalNAc₁- | PO | 2256 |
| | T_{ds}G_{ds}A_{ds}^{m}C_{ds}T_{ds}Tₑₒ^{m}Cₑₒ^{m}CₑₛTₑₛ | 29ₐ | | |
| | T_{eo′-}GalNAc₁-29_{-o′} | | | |
| 713849 | Gₑₛ^{m}CesTₑₛTₑₛ^{m}CₑₛA_{ds}G_{ds}T_{ds}^{m}C_{ds} | GalNAc₁- | A_{d} | 2257 |
| | A_{ds}T_{ds}G_{ds}A_{ds}^{m}C_{ds}T_{ds}Tₑₛ^{m}Cₑₛ^{m}CₑₛTₑₛ | 29ₐ | | |
| | TₑₒA_{do′}-GalNAc₁-29ₐ | | | |
| 713850 | Gₑₛ^{m}CₑₒTₑₒTₑₒ^{m}CₑₒA_{ds}G_{ds}T_{ds}^{m}C_{ds}A_{ds} | GalNac₁- | A_{d} | 2257 |
| | T_{ds}G_{ds}A_{ds}^{m}C_{ds}T_{ds}Tₑₒ^{m}Cₑₒ^{m}CₑₛTₑₛTₑₒ | 29ₐ | | |
| | A_{do′}-GalNAc₁-29ₐ | | | |

### Example 113: Antisense Oligonucleotides Targeting Kallikrein B, Plasma (Fletcher Factor) 1 Comprising a GalNAc Cluster

[1072] The oligonucleotides in Table 121 were designed to target human kallikrein B, plasma (Fletcher factor) 1, or prekallikrein (PKK).

TABLE 121

| | SEQ |
|---|---|
| Sequences (5′ to 3′) | ID No. |
| GalNAc₃-3-TₑₛGₑₛ^{m}CₑₛAₑₛAₑₛG_{ds}T_{ds}^{m}C_{ds}T_{ds}^{m}C_{ds}T_{ds}T_{ds}G_{ds} | 570 |
| G_{ds}^{m}C_{ds}AₑₛAₑₛAₑₛ^{m}CₑₛAₑ | |
| GalNAc₃-3-TₑₛGₑₒ^{m}CₑₒAₑₒAₑₒG_{ds}T_{ds}^{m}C_{ds}T_{ds}^{m}C_{ds}T_{ds}T_{ds}G_{ds} | 570 |
| G_{ds}^{m}C_{ds}AₑₒAₑₒAₑₛ^{m}CₑₛAₑ | |
| GalNAc₃-7-TₑₛGₑₛ^{m}CₑₛAₑₛAₑₛG_{ds}T_{ds}^{m}C_{ds}T_{ds}^{m}C_{ds}T_{ds}T_{ds}G_{ds} | 570 |
| G_{ds}^{m}C_{ds}AₑₛAₑₛAₑₛ^{m}CₑₛAₑ | |
| GalNAc₃-7-TₑₛGₑₒ^{m}CₑₒAₑₒAₑₒG_{ds}T_{ds}^{m}C_{ds}T_{ds}^{m}C_{ds}T_{ds}T_{ds}G_{ds} | 570 |
| G_{ds}^{m}C_{ds}AₑₒAₑₒAₑₛ^{m}CₑₛAₑ | |
| GalNAc₃-10-TₑₛGₑₛ^{m}CₑₛAₑₛAₑₛG_{ds}T_{ds}^{m}C_{ds}T_{ds}^{m}C_{ds}T_{ds}T_{ds}G_{ds} | 570 |
| G_{ds}^{m}C_{ds}AₑₛAₑₛAₑₛ^{m}CₑₛAₑ | |
| GalNAc₃-10-TₑₛGₑₒ^{m}CₑₒAₑₒAₑₒG_{ds}T_{ds}^{m}C_{ds}T_{ds}^{m}C_{ds}T_{ds}T_{ds}G_{ds} | 570 |
| G_{ds}^{m}C_{ds}AₑₒAₑₒAₑₛ^{m}CₑₛAₑ | |
| GalNAc₃-13-TₑₛGₑₛ^{m}CₑₛAₑₛAₑₛG_{ds}T_{ds}^{m}C_{ds}T_{ds}^{m}C_{ds}T_{ds}T_{ds}G_{ds} | 570 |
| G_{ds}^{m}C_{ds}AₑₛAₑₛAₑₛ^{m}CₑₛAₑ | |
| GalNAc₃-13-TₑₛGₑₒ^{m}CₑₒAₑₒAₑₒG_{ds}T_{ds}^{m}C_{ds}T_{ds}^{m}C_{ds}T_{ds}T_{ds}G_{ds} | 570 |
| G_{ds}^{m}C_{ds}AₑₒAₑₒAₑₛ^{m}CₑₛAₑ | |
| TₑₛGₑₛ^{m}CₑₛAₑₛAₑₛG_{ds}T_{ds}^{m}C_{ds}T_{ds}^{m}C_{ds}T_{ds}T_{ds}G_{ds}G_{ds}^{m}C_{ds}AₑₛAₑₛ | 570 |
| Aₑₛ^{m}CₑₛAₑ-GalNAc₃-19 | |
| TₑₛGₑₒ^{m}CₑₒAₑₒAₑₒG_{ds}T_{ds}^{m}C_{ds}T_{ds}^{m}C_{ds}T_{ds}T_{ds}G_{ds}G_{ds}^{m}C_{ds}AₑₒAₑₒ | 570 |
| Aₑₛ^{m}CₑₛAₑ-GalNAc₃-19 | |
| GalNAc₃-7_{a-o′}TₑₛGₑₛ^{m}CₑₒAₑₒAₑₛG_{ds}T_{ds}^{m}C_{ds}T_{ds}^{m}C_{ds}T_{ds}T_{ds}G_{ds} | 570 |
| G_{ds}^{m}C_{ds}AₑₒAₑₒAₑₛ^{m}CₑₛAₑ | |

### Example 114: Antisense Inhibition of Human PKK in HepaRG^{TM}^{^{T}} Cells by Antisense Oligonucleotides with 2′-MOE Sugar Modifications

[1073] Antisense oligonucleotides were designed targeting a PKK nucleic acid and were tested for their effects on PKK mRNA in vitro. HepaRG™ Cells, which are terminally differentiated hepatic cells derived from a human hepatic progenitor cell line and retain many characteristics of primary human hepatocytes (Lubberstedt M. et al., J. Pharmacol. Toxicol. Methods 2011 63: 59-68), were used in the screen.

[1074] The chimeric antisense oligonucleotides in the tables below were designed as 5-10-5 MOE gapmers. The gapmers are 20 nucleosides in length, wherein the central gap segment comprises of ten 2′-deoxynucleosides and is flanked by wing segments on the 5′ direction and the 3′ direction comprising five nucleosides each. Each nucleoside in the 5′ wing segment and each nucleoside in the 3′ wing segment has a 2′-O-methoxyethyl modification. The internucleoside linkages throughout each gapmer are phosphorothioate linkages. All cytosine residues throughout each gapmer are 5-methylcytosines. “Start site” indicates the 5′-most nucleoside to which the gapmer is targeted in the human gene sequence. “Stop site” indicates the 3′-most nucleoside to which the gapmer is targeted in the human gene sequence. Each gapmer listed in the tables below is targeted to either the human PKK mRNA, designated herein as SEQ ID NO: 1 (GENBANK Accession No. NM_000892.3) or the human PKK genomic sequence, designated herein as SEQ ID NO: 10 (GENBANK Accession No. NT_016354.19 truncated from nucleotides 111693001 to 111730000). ‘n/a’ indicates that the antisense oligonucleotide does not target that particular gene sequence.

[1075] Cultured HepaRG™ cells at a density of 20,000 cells per well were transfected using electroporation with 3,000 nM antisense oligonucleotide. After a treatment period of approximately 24 hours, RNA was isolated from the cells and PKK mRNA levels were measured by quantitative real-time PCR. Human primer probe set RT 3454 (forward sequence CCAAAAAAGGTGCACCAGTAACA, designated herein as SEQ ID NO: 20; reverse sequence CCTCCGGGACTGTACTTTAATAGG, designated herein as SEQ ID NO 21 probe sequence CACGCAAACATTTCACAAGGCAGAGTACC, designated herein as SEQ ID NO: 22) was used to measure mRNA levels. PKK mRNA levels were adjusted according to total RNA content, as measured by RIBOGREEN®. The antisense oligonucleotides were tested in a series of experiments that had similar culture conditions. The results for each experiment are presented in separate tables shown below. Results are presented as percent inhibition of PKK, relative to untreated control cells.

TABLE 122

| | SEQ ID | SEQ ID | | | SEQ ID | SEQ ID | |
|---|---|---|---|---|---|---|---|
| | NO: 1 | NO: 1 | | | NO: 10 | NO: 10 | |
| ISIS | Start | Stop | | % | Start | Stop | SEQ |
| NO | Site | Site | Sequence | inhibition | Site | Site | ID NO |
| 530929 | 1 | 20 | AACGGTCTTCAAGCTGTTCT | 59 | 3393 | 3412 | 30 |
| 530930 | 6 | 25 | AAATGAACGGTCTTCAAGCT | 17 | 3398 | 3417 | 31 |
| 530931 | 11 | 30 | CTTAAAAATGAACGGTCTTC | 29 | 3403 | 3422 | 32 |
| 530932 | 16 | 35 | TGTCACTTAAAAATGAACGG | 52 | 3408 | 3427 | 33 |
| 530933 | 31 | 50 | TGGAGGTGAGTCTCTTGTCA | 76 | 3423 | 3442 | 34 |
| 530934 | 36 | 55 | CTTCTTGGAGGTGAGTCTCT | 54 | 3428 | 3447 | 35 |
| 530935 | 68 | 87 | GCTTGAATAAAATCATTCTG | 0 | n/a | n/a | 36 |
| 530936 | 73 | 92 | TGCTTGCTTGAATAAAATCA | 27 | 4072 | 4091 | 37 |
| 530937 | 78 | 97 | TAAGTTGCTTGCTTGAATAA | 0 | 4077 | 4096 | 38 |
| 530938 | 88 | 107 | GGAAATGAAATAAGTTGCTT | 11 | 4087 | 4106 | 39 |
| 530939 | 93 | 112 | AACAAGGAAATGAAATAAGT | 0 | 4092 | 4111 | 40 |
| 530940 | 98 | 117 | TAGCAAACAAGGAAATGAAA | 7 | 4097 | 4116 | 41 |
| 530941 | 103 | 122 | AACTGTAGCAAACAAGGAAA | 22 | 4102 | 4121 | 42 |
| 530942 | 108 | 127 | CAGGAAACTGTAGCAAACAA | 22 | 4107 | 4126 | 43 |
| 530943 | 113 | 132 | ATCCACAGGAAACTGTAGCA | 56 | n/a | n/a | 44 |
| 530944 | 118 | 137 | CAGACATCCACAGGAAACTG | 0 | n/a | n/a | 45 |
| 530945 | 157 | 176 | ATCCCCACCTCTGAAGAAGG | 0 | 8029 | 8048 | 46 |
| 530946 | 160 | 179 | TACATCCCCACCTCTGAAGA | 0 | 8032 | 8051 | 47 |
| 530947 | 165 | 184 | GAAGCTACATCCCCACCTCT | 27 | 8037 | 8056 | 48 |
| 530948 | 170 | 189 | ACATGGAAGCTACATCCCCA | 35 | 8042 | 8061 | 49 |
| 530949 | 175 | 194 | GGTGTACATGGAAGCTACAT | 31 | 8047 | 8066 | 50 |
| 530950 | 221 | 240 | ACCTTGGGTGGAATGTGCAC | 47 | 8093 | 8112 | 51 |
| 530951 | 226 | 245 | CAAACACCTTGGGTGGAATG | 49 | 8098 | 8117 | 52 |
| 530952 | 234 | 253 | CTGAATAGCAAACACCTTGG | 38 | 8106 | 8125 | 53 |
| 530953 | 239 | 258 | GAAAACTGAATAGCAAACAC | 7 | 8111 | 8130 | 54 |
| 530954 | 244 | 263 | TGGAAGAAAACTGAATAGCA | 47 | 8116 | 8135 | 55 |
| 530955 | 278 | 297 | CAAACCTTTTCTCCATGTCA | 55 | n/a | n/a | 56 |
| 530956 | 300 | 319 | ACACTATCTTTCAAGAAGCA | 57 | 9834 | 9853 | 57 |
| 530957 | 386 | 405 | GGCAAGCACTTATTTGATGA | 56 | n/a | n/a | 58 |
| 530958 | 432 | 451 | TTAAAATTGACTCCTCTCAT | 60 | 12688 | 12707 | 59 |
| 530959 | 456 | 475 | TCAACACTGCTAACCTTAGA | 60 | 12712 | 12731 | 60 |
| 530960 | 461 | 480 | ATTCTTCAACACTGCTAACC | 58 | 12717 | 12736 | 61 |
| 530961 | 466 | 485 | TTGGCATTCTTCAACACTGC | 88 | 12722 | 12741 | 62 |
| 530962 | 472 | 491 | CCTTTTTTGGCATTCTTCAA | 64 | 12728 | 12747 | 63 |
| 530963 | 479 | 498 | TGGTGCACCTTTTTTGGCAT | 78 | 12735 | 12754 | 64 |
| 530964 | 628 | 647 | CTTCAGTGAGAATCCAGATT | 44 | 14199 | 14218 | 65 |
| 530965 | 637 | 656 | GGCACAGGGCTTCAGTGAGA | 73 | 14208 | 14227 | 66 |
| 530966 | 649 | 668 | AATTTCTGAAAGGGCACAGG | 58 | 14220 | 14239 | 67 |
| 530967 | 654 | 673 | CAACCAATTTCTGAAAGGGC | 69 | n/a | n/a | 68 |
| 530968 | 680 | 699 | CAAGATGCTGGAAGATGTTC | 18 | 26128 | 26147 | 69 |
| 530969 | 846 | 865 | GTGCCACTTTCAGATGTTTT | 0 | 27110 | 27129 | 70 |
| 530970 | 851 | 870 | TTGGTGTGCCACTTTCAGAT | 74 | 27115 | 27134 | 71 |
| 530971 | 856 | 875 | GGAACTTGGTGTGCCACTTT | 85 | 27120 | 27139 | 72 |
| 530972 | 861 | 880 | GTAGAGGAACTTGGTGTGCC | 42 | 27125 | 27144 | 73 |
| 530973 | 866 | 885 | GAGGAGTAGAGGAACTTGGT | 52 | 27130 | 27149 | 74 |
| 530974 | 871 | 890 | TTCTTGAGGAGTAGAGGAAC | 18 | 27135 | 27154 | 75 |
| 530975 | 876 | 895 | GTGTTTTCTTGAGGAGTAGA | 41 | 27140 | 27159 | 76 |
| 530976 | 881 | 900 | ATATGGTGTTTTCTTGAGGA | 26 | 27145 | 27164 | 77 |
| 530977 | 886 | 905 | TCCAGATATGGTGTTTTCTT | 55 | 27150 | 27169 | 78 |
| 530978 | 891 | 910 | CTATATCCAGATATGGTGTT | 0 | 27155 | 27174 | 79 |
| 530979 | 901 | 920 | GGTTAAAAGGCTATATCCAG | 35 | 27165 | 27184 | 80 |
| 530980 | 906 | 925 | TTGCAGGTTAAAAGGCTATA | 29 | 27170 | 27189 | 81 |
| 530981 | 911 | 930 | TTCTTTTGCAGGTTAAAAGG | 0 | 27175 | 27194 | 82 |
| 530982 | 916 | 935 | TAAAGTTCTTTTGCAGGTTA | 0 | 27180 | 27199 | 83 |
| 530983 | 931 | 950 | ATGGCAGGGTTCAGGTAAAG | 9 | n/a | n/a | 84 |
| 530984 | 936 | 955 | TTAGAATGGCAGGGTTCAGG | 25 | n/a | n/a | 85 |
| 530985 | 941 | 960 | AAATTTTAGAATGGCAGGGT | 32 | 27363 | 27382 | 86 |
| 530986 | 946 | 965 | CGGGTAAATTTTAGAATGGC | 62 | 27368 | 27387 | 87 |
| 530987 | 951 | 970 | ACTCCCGGGTAAATTTTAGA | 0 | 27373 | 27392 | 88 |
| 530988 | 961 | 980 | TCCAAAGTCAACTCCCGGGT | 76 | 27383 | 27402 | 89 |
| 530989 | 966 | 985 | TCTCCTCCAAAGTCAACTCC | 28 | 27388 | 27407 | 90 |
| 530990 | 971 | 990 | ATTCTTCTCCTCCAAAGTCA | 32 | 27393 | 27412 | 91 |
| 530991 | 976 | 995 | ATTCAATTCTTCTCCTCCAA | 43 | 27398 | 27417 | 92 |
| 530992 | 981 | 1000 | GTCACATTCAATTCTTCTCC | 70 | 27403 | 27422 | 93 |
| 530993 | 1005 | 1024 | CAAACATTCACTCCTTTAAC | 30 | 27427 | 27446 | 94 |
| 530994 | 1010 | 1029 | CTTGGCAAACATTCACTCCT | 50 | 27432 | 27451 | 95 |
| 530995 | 1015 | 1034 | AGTCTCTTGGCAAACATTCA | 49 | 27437 | 27456 | 96 |
| 530996 | 1038 | 1057 | TGACAGCGAATCATCTTTGT | 51 | 27460 | 27479 | 97 |
| 530997 | 1043 | 1062 | AAAACTGACAGCGAATCATC | 39 | 27465 | 27484 | 98 |
| 530998 | 1048 | 1067 | AGTGAAAAACTGACAGCGAA | 0 | 27470 | 27489 | 99 |
| 530999 | 1071 | 1090 | CAGTCTTCTGGGAGTAAAGA | 31 | 27493 | 27512 | 100 |
| 531000 | 1098 | 1117 | AAGAAACACTTACACTTCTC | 1 | n/a | n/a | 101 |
| 531001 | 1108 | 1127 | AGATAATCTTAAGAAACACT | 44 | 27629 | 27648 | 102 |
| 531002 | 1155 | 1174 | GAGCTCCCTTGTGTCCCATA | 85 | 27676 | 27695 | 103 |
| 531003 | 1160 | 1179 | AACCAGAGCTCCCTTGTGTC | 49 | 27681 | 27700 | 104 |
| 531004 | 1165 | 1184 | AGAGTAACCAGAGCTCCCTT | 76 | 27686 | 27705 | 105 |
| 531005 | 1170 | 1189 | CTCAAAGAGTAACCAGAGCT | 76 | 27691 | 27710 | 106 |
| 531006 | 1216 | 1235 | GCTTGTTTTTGTTGTGCAGA | 49 | 27892 | 27911 | 107 |

TABLE 123

| | SEQ ID | SEQ ID | | | SEQ ID | SEQ ID | |
|---|---|---|---|---|---|---|---|
| | NO: 1 | NO: 1 | | | NO: 10 | NO: 10 | |
| ISIS | Start | Stop | | % | Start | Stop | SEQ |
| NO | Site | Site | Sequence | inhibition | Site | Site | ID NO |
| 482586 | 1608 | 1627 | ACCCAACAGTTGGTATAAAT | 0 | 31914 | 31933 | 108 |
| 486847 | 1563 | 1582 | AGGCATATTGGTTTTTGGAA | 78 | 31869 | 31888 | 109 |
| 531007 | 46 | 65 | AACACAATTGCTTCTTGGAG | 51 | 3438 | 3457 | 110 |
| 531008 | 675 | 694 | TGCTGGAAGATGTTCATGTG | 51 | 26123 | 26142 | 111 |
| 531009 | 1239 | 1258 | TTTGTTCCTCCAACAATGCG | 65 | 27915 | 27934 | 112 |
| 531010 | 1244 | 1263 | AAGAGTTTGTTCCTCCAACA | 52 | 27920 | 27939 | 113 |
| 531011 | 1249 | 1268 | CCAAGAAGAGTTTGTTCCTC | 0 | 27925 | 27944 | 114 |
| 531012 | 1254 | 1273 | TCTCCCCAAGAAGAGTTTGT | 48 | 27930 | 27949 | 115 |
| 531013 | 1264 | 1283 | CCAGGGCCACTCTCCCCAAG | 56 | 27940 | 27959 | 116 |
| 531014 | 1287 | 1306 | AGCTTCACCTGCAGGCTCAC | 0 | 27963 | 27982 | 117 |
| 531015 | 1324 | 1343 | TATGAGTGACCCTCCACACA | 52 | 28000 | 28019 | 118 |
| 531016 | 1329 | 1348 | TGTCCTATGAGTGACCCTCC | 39 | 28005 | 28024 | 119 |
| 531017 | 1334 | 1353 | ACTGGTGTCCTATGAGTGAC | 31 | 28010 | 28029 | 120 |
| 531018 | 1339 | 1358 | GACCCACTGGTGTCCTATGA | 54 | 28015 | 28034 | 121 |
| 531019 | 1344 | 1363 | GTGAGGACCCACTGGTGTCC | 28 | 28020 | 28039 | 122 |
| 531020 | 1369 | 1388 | AAGCCCATCAAAGCAGTGGG | 0 | n/a | n/a | 123 |
| 531021 | 1420 | 1439 | GTCTGACAGATTTAAAATGC | 50 | 30498 | 30517 | 124 |
| 531022 | 1425 | 1444 | GTAATGTCTGACAGATTTAA | 74 | 30503 | 30522 | 125 |
| 531023 | 1430 | 1449 | CTTTTGTAATGTCTGACAGA | 71 | 30508 | 30527 | 126 |
| 531024 | 1452 | 1471 | TTTATTTGTGAGAAAGGTGT | 69 | 30530 | 30549 | 127 |
| 531025 | 1457 | 1476 | TCTCTTTTATTTGTGAGAAA | 34 | 30535 | 30554 | 128 |
| 531026 | 1501 | 1520 | ATCATGATTCCCTTCTGAGA | 73 | 30579 | 30598 | 129 |
| 531027 | 1530 | 1549 | AAAGGAGCCTGGAGTTTTAT | 0 | 30608 | 30627 | 130 |
| 531028 | 1535 | 1554 | AATTCAAAGGAGCCTGGAGT | 56 | 30613 | 30632 | 131 |
| 531029 | 1540 | 1559 | AGTGTAATTCAAAGGAGCCT | 59 | 30618 | 30637 | 132 |
| 531030 | 1545 | 1564 | AATTCAGTGTAATTCAAAGG | 24 | n/a | n/a | 133 |
| 531031 | 1550 | 1569 | TTTGGAATTCAGTGTAATTC | 59 | n/a | n/a | 134 |
| 531032 | 1555 | 1574 | TGGTTTTTGGAATTCAGTGT | 67 | n/a | n/a | 135 |
| 531033 | 1557 | 1576 | ATTGGTTTTTGGAATTCAGT | 53 | n/a | n/a | 136 |
| 531034 | 1560 | 1579 | CATATTGGTTTTTGGAATTC | 36 | 31866 | 31885 | 137 |
| 531035 | 1565 | 1584 | GTAGGCATATTGGTTTTTGG | 46 | 31871 | 31890 | 138 |
| 531036 | 1581 | 1600 | GTGTCACCTTTGGAAGGTAG | 71 | 31887 | 31906 | 139 |
| 531037 | 1604 | 1623 | AACAGTTGGTATAAATTGTG | 35 | 31910 | 31929 | 140 |
| 531038 | 1605 | 1624 | CAACAGTTGGTATAAATTGT | 22 | 31911 | 31930 | 141 |
| 531039 | 1609 | 1628 | TACCCAACAGTTGGTATAAA | 36 | 31915 | 31934 | 142 |
| 531040 | 1632 | 1651 | TCCTTCGAGAAGCCCCATCC | 27 | 31938 | 31957 | 143 |
| 531041 | 1677 | 1696 | AAAGGAATATTTACCTTTTG | 68 | 33121 | 33140 | 144 |
| 531042 | 1682 | 1701 | TTACCAAAGGAATATTTACC | 11 | 33126 | 33145 | 145 |
| 531043 | 1687 | 1706 | ATTTGTTACCAAAGGAATAT | 27 | 33131 | 33150 | 146 |
| 531044 | 1697 | 1716 | GGCATTCTTCATTTGTTACC | 68 | 33141 | 33160 | 147 |
| 531045 | 1702 | 1721 | TTTCTGGCATTCTTCATTTG | 37 | 33146 | 33165 | 148 |
| 531046 | 1709 | 1728 | GATATCTTTTCTGGCATTCT | 54 | 33153 | 33172 | 149 |
| 531047 | 1714 | 1733 | ATCTTGATATCTTTTCTGGC | 68 | 33158 | 33177 | 150 |
| 531048 | 1719 | 1738 | TTATAATCTTGATATCTTTT | 42 | 33163 | 33182 | 151 |
| 531049 | 1724 | 1743 | TTATTTTATAATCTTGATAT | 2 | 33168 | 33187 | 152 |
| 531050 | 1729 | 1748 | TTGGGTTATTTTATAATCTT | 18 | 33173 | 33192 | 153 |
| 531051 | 1734 | 1753 | ATCCGTTGGGTTATTTTATA | 51 | 33178 | 33197 | 154 |
| 531052 | 1739 | 1758 | AGACCATCCGTTGGGTTATT | 60 | 33183 | 33202 | 155 |
| 531053 | 1744 | 1763 | AGCACAGACCATCCGTTGGG | 49 | 33188 | 33207 | 156 |
| 531054 | 1754 | 1773 | CTTTATAGCCAGCACAGACC | 48 | 33198 | 33217 | 157 |
| 531055 | 1759 | 1778 | CCCTTCTTTATAGCCAGCAC | 68 | 33203 | 33222 | 158 |
| 531056 | 1764 | 1783 | TTTCCCCCTTCTTTATAGCC | 45 | 33208 | 33227 | 159 |
| 531057 | 1769 | 1788 | CATCTTTTCCCCCTTCTTTA | 48 | 33213 | 33232 | 160 |
| 531058 | 1779 | 1798 | CCCTTACAAGCATCTTTTCC | 60 | n/a | n/a | 161 |
| 531059 | 1820 | 1839 | ACATTCCATTGTGTTTGCAA | 55 | 33919 | 33938 | 162 |
| 531060 | 1841 | 1860 | TGGTGATGCCCACCAAACGC | 35 | 33940 | 33959 | 163 |
| 531061 | 1872 | 1891 | TGCTCCCTGCGGGCACAGCC | 52 | 33971 | 33990 | 164 |
| 531062 | 1877 | 1896 | CAGGTTGCTCCCTGCGGGCA | 39 | 33976 | 33995 | 165 |
| 531063 | 1882 | 1901 | GACACCAGGTTGCTCCCTGC | 51 | 33981 | 34000 | 166 |
| 531064 | 1887 | 1906 | GTGTAGACACCAGGTTGCTC | 56 | 33986 | 34005 | 167 |
| 531065 | 1892 | 1911 | CTTTGGTGTAGACACCAGGT | 57 | 33991 | 34010 | 168 |
| 531066 | 1897 | 1916 | AGCGACTTTGGTGTAGACAC | 67 | 33996 | 34015 | 169 |
| 531067 | 1902 | 1921 | TACTCAGCGACTTTGGTGTA | 31 | 34001 | 34020 | 170 |
| 531068 | 1907 | 1926 | CCATGTACTCAGCGACTTTG | 59 | 34006 | 34025 | 171 |
| 531069 | 1912 | 1931 | CCAGTCCATGTACTCAGCGA | 56 | 34011 | 34030 | 172 |
| 531070 | 1930 | 1949 | CTGTGTTTTCTCTAAAATCC | 68 | 34029 | 34048 | 173 |
| 531071 | 1935 | 1954 | CTGCTCTGTGTTTTCTCTAA | 73 | 34034 | 34053 | 174 |
| 531072 | 2026 | 2045 | GCTCAGAATTTGACTTGAAC | 64 | 34125 | 34144 | 175 |
| 531073 | 2031 | 2050 | CCCAGGCTCAGAATTTGACT | 51 | 34130 | 34149 | 176 |
| 531074 | 2049 | 2068 | CTTTGCAGATGAGGACCCCC | 67 | 34148 | 34167 | 177 |
| 531075 | 2054 | 2073 | CCATGCTTTGCAGATGAGGA | 64 | 34153 | 34172 | 178 |
| 531076 | 2059 | 2078 | ACTCTCCATGCTTTGCAGAT | 68 | 34158 | 34177 | 179 |
| 531077 | 2064 | 2083 | ATGCCACTCTCCATGCTTTG | 51 | 34163 | 34182 | 180 |
| 531078 | 2111 | 2130 | AGCAGCTCTGAGTGCACTGT | 77 | 34210 | 34229 | 181 |
| 531079 | 2116 | 2135 | TCCTCAGCAGCTCTGAGTGC | 58 | 34215 | 34234 | 182 |
| 531080 | 2121 | 2140 | CATTGTCCTCAGCAGCTCTG | 55 | 34220 | 34239 | 183 |
| 531081 | n/a | n/a | TGGTTTTTGGAATTCTGAAA | 14 | 31861 | 31880 | 184 |
| 531082 | n/a | n/a | ATATTGGTTTTTGGAATTCT | 31 | 31865 | 31884 | 185 |

TABLE 124

| | SEQ ID | SEQ ID | | | SEQ ID | SEQ ID | |
|---|---|---|---|---|---|---|---|
| | NO: 1 | NO: 1 | | | NO: 10 | NO: 10 | |
| ISIS | Start | Stop | | % | Start | Stop | SEQ |
| NO | Site | Site | Sequence | inhibition | Site | Site | ID NO |
| 531083 | n/a | n/a | TGTACTAGTTTCCTATAACT | 60 | 14738 | 14757 | 186 |
| | | | | | 14809 | 14828 | |
| | | | | | 14880 | 14899 | |
| | | | | | 14909 | 14958 | |
| | | | | | 15071 | 15090 | |
| | | | | | 15214 | 15233 | |
| | | | | | 15286 | 15305 | |
| | | | | | 15345 | 15364 | |
| | | | | | 15477 | 15496 | |
| | | | | | 15549 | 15568 | |
| | | | | | 15607 | 15626 | |
| | | | | | 15679 | 15698 | |
| | | | | | 15809 | 15828 | |
| | | | | | 15881 | 15900 | |
| | | | | | 15939 | 15958 | |
| 531084 | n/a | n/a | ATAGGGACACAACCAAGGAA | 25 | 16296 | 16315 | 187 |
| 531085 | n/a | n/a | AGGCACAGAGCCAGCACCCA | 9 | 16495 | 16514 | 188 |
| 531086 | n/a | n/a | CCTGCCTCCTGGCAGCCTTC | 48 | 16696 | 16715 | 189 |
| 531087 | n/a | n/a | CCAGGTGTGGACAGCAGCTG | 52 | 16821 | 16840 | 190 |
| 531088 | n/a | n/a | GGTTTTGTTTGTAAAATTAG | 27 | 17159 | 17178 | 191 |
| 531089 | n/a | n/a | AAAACACCATTAAATCCATT | 45 | 17306 | 17325 | 192 |
| 531090 | n/a | n/a | ACAGAAACCATGATGTTGCT | 59 | 17644 | 17663 | 193 |
| 531091 | n/a | n/a | TCAGCCCAATGTCCTAACCT | 35 | 17793 | 17812 | 194 |
| 531092 | n/a | n/a | CCTTCACTGACTCTCTTTTC | 24 | 17922 | 17941 | 195 |
| 531093 | n/a | n/a | TTCTCCTGGCTCAGAAGCTC | 60 | 18053 | 18072 | 196 |
| | | | | | 23315 | 23334 | |
| 531094 | n/a | n/a | GAATGTCAGGCCTCTGGGCC | 48 | 18181 | 18200 | 197 |
| 531095 | n/a | n/a | CTAACAACCCCACAATATCA | 20 | 18390 | 18409 | 198 |
| 531096 | n/a | n/a | CCCAATTCTTAGTCCTTTAA | 45 | 18523 | 18542 | 199 |
| 531097 | n/a | n/a | ACCAAGCTCAGCCTCCAACT | 41 | 18648 | 18667 | 200 |
| 531098 | n/a | n/a | TTATTAGTCAAATCACCCAA | 19 | 18773 | 18792 | 201 |
| 531099 | n/a | n/a | TGGATGGGTAGAGGCCTTTC | 64 | 18898 | 18917 | 202 |
| 531100 | n/a | n/a | CCCCCTCCCTTCCCTACACA | 0 | 19023 | 19042 | 203 |
| 531101 | n/a | n/a | ATGTAAGTTACAAGCCACTA | 37 | 19153 | 19172 | 204 |
| 531102 | n/a | n/a | TGCCTCTTTAATAAAAACTC | 42 | 19484 | 19503 | 205 |
| 531103 | n/a | n/a | ACTCATTGCCTTAACTCAGG | 40 | 19636 | 19655 | 206 |
| 531104 | n/a | n/a | ACTTGACCTTACTGTTTTAG | 20 | 19886 | 19905 | 207 |
| 531105 | n/a | n/a | CTCCTCCCCAGGCTGCTCCT | 16 | 22092 | 22111 | 208 |
| 531106 | n/a | n/a | AAGATCTAGATAATTCTTGT | 31 | 22332 | 22351 | 209 |
| 531107 | n/a | n/a | TCAACTCACACCTGACCTAA | 30 | 22457 | 22476 | 210 |
| 531108 | n/a | n/a | TGAACCCAAAACTCTGGCAC | 50 | 22771 | 22790 | 211 |
| 531109 | n/a | n/a | AGCCCAAGGAACATCTCACC | 52 | 22959 | 22978 | 212 |
| 531110 | n/a | n/a | GCCTGTTTGGTGGTCTCTTC | 86 | 23110 | 23129 | 213 |
| 531111 | n/a | n/a | CTTCTCCTGGCTCAGAAGCT | 68 | 18054 | 18073 | 214 |
| | | | | | 23316 | 23335 | |
| 531112 | n/a | n/a | ATGTATGATTCTAAGAACTT | 14 | 23479 | 23498 | 215 |
| 531113 | n/a | n/a | AACAGACACATTATTTATAT | 0 | 23604 | 23623 | 216 |
| 531114 | n/a | n/a | AGAGTCAAGTCCACAGACAT | 40 | 24246 | 24265 | 217 |
| 531115 | n/a | n/a | TCCTAAATAGGAACAAAGTA | 0 | 24372 | 24391 | 218 |
| 531116 | n/a | n/a | TTGTTAAGGTTGTAGAGAGA | 23 | 24688 | 24707 | 219 |
| 531117 | n/a | n/a | ACCCAATTATTTTTAATGGC | 62 | 24876 | 24895 | 220 |
| 531118 | n/a | n/a | GCCTAAATGTAAGAGCTAAA | 26 | 25157 | 25176 | 221 |
| 531119 | n/a | n/a | TAAACTCTTACATTTATAGA | 0 | 25293 | 25312 | 222 |
| 531120 | n/a | n/a | AAATAAAAGCACTCAGACTG | 0 | 25418 | 25437 | 223 |
| 531121 | n/a | n/a | TTGGTCTACAGATTCAATGC | 72 | 25550 | 25569 | 224 |
| 531122 | n/a | n/a | TAACAAAAATGCCTTGTGCC | 33 | 25710 | 25729 | 225 |
| 531123 | n/a | n/a | TCCCAGCTCCAGTCACCACC | 74 | 25866 | 25885 | 226 |
| 531124 | n/a | n/a | GTACTAAACATCCTAAGTGA | 2 | 25992 | 26011 | 227 |
| 531125 | n/a | n/a | ACTCGCCTTTGTGACTCGAT | 23 | 26264 | 26283 | 228 |
| 531126 | n/a | n/a | TTTTGAATCTTCATTCAAAG | 0 | 26551 | 26570 | 229 |
| 531127 | n/a | n/a | CAGAGCCTTGATCAGAATAA | 12 | 26676 | 26695 | 230 |
| 531128 | n/a | n/a | AAGTTCCACCTTCTAACTGG | 18 | 26831 | 26850 | 231 |
| 531129 | n/a | n/a | AGCAGCTCACACCCAAAAAG | 0 | 27005 | 27024 | 232 |
| 531130 | n/a | n/a | TTCTGTGTCAATTATAAACA | 0 | 27344 | 27363 | 233 |
| 531131 | n/a | n/a | TAGAAAGAGTAAGCCTTCAC | 0 | 27587 | 27606 | 234 |
| 531132 | n/a | n/a | AGTGAGGTTACTCACCAGAG | 0 | 27732 | 27751 | 235 |
| 531133 | n/a | n/a | TTTTGTTGTGCAGACTGAAA | 19 | 27886 | 27905 | 236 |
| 531134 | n/a | n/a | TTACCCATCAAAGCAGTGGG | 6 | 28045 | 28064 | 237 |
| 531135 | n/a | n/a | AATGTTGTGAATACCATCCC | 16 | 28174 | 28193 | 238 |
| 531136 | n/a | n/a | TAACATTTCTATGGGCCTGA | 6 | 28670 | 28689 | 239 |
| 531137 | n/a | n/a | TGTCTACTATTTGACCAATA | 19 | 28795 | 28814 | 240 |
| 531138 | n/a | n/a | TTTAAATGTGTCACTTAATC | 0 | 28987 | 29006 | 241 |
| 531139 | n/a | n/a | TCACTAAAACAAAAATACTT | 0 | 29156 | 29175 | 242 |
| 531140 | n/a | n/a | TCTTCCAGGCCAACCACCTT | 22 | 29321 | 29340 | 243 |
| 531141 | n/a | n/a | TGCAAGGCATGTGTGCACAA | 47 | 29532 | 29551 | 244 |
| 531142 | n/a | n/a | TGTTTAAAATATCTCTATAC | 8 | 30008 | 30027 | 245 |
| 531143 | n/a | n/a | CATGGAAAAATTAAGCTCAT | 0 | 30133 | 30152 | 246 |
| 531144 | n/a | n/a | TGAAGATTCTATTTAACAAA | 0 | 30266 | 30285 | 247 |
| 531145 | n/a | n/a | GCCTAGGAGAGAAAAATAAA | 0 | 30445 | 30464 | 248 |
| 531146 | n/a | n/a | CCAGTGTAATTCAAAGGAGC | 40 | 30620 | 30639 | 249 |
| 531147 | n/a | n/a | CCATTATTTCCATCACCTGC | 18 | 30871 | 30890 | 250 |
| 531148 | n/a | n/a | TACCCAAATTATACCTGGAA | 8 | 31015 | 31034 | 251 |
| 531149 | n/a | n/a | AGAGGTAAAGCAACTTGCCC | 45 | 31429 | 31448 | 252 |
| 531150 | n/a | n/a | TCCTTAATAGTCATAGCAGG | 48 | 31558 | 31577 | 253 |
| 531151 | n/a | n/a | TCACCACCATTTTTCACATG | 44 | 31683 | 31702 | 254 |
| 531152 | n/a | n/a | GTTATGGATATAGACTTTAA | 0 | 31808 | 31827 | 255 |
| 531153 | n/a | n/a | CTAGAAGCAATATTTAAAGC | 0 | 31974 | 31993 | 256 |
| 531154 | n/a | n/a | ATGAAGTAAGATGCTTAAAA | 16 | 32162 | 32181 | 257 |
| 531155 | n/a | n/a | CTTCTTGTCTCAGATTACCA | 79 | 32464 | 32483 | 258 |
| 531156 | n/a | n/a | TCTGAAAAGCCCTCCGAGCT | 0 | 32589 | 32608 | 259 |
| 531157 | n/a | n/a | AAGTGAATCAGAGCAGTGTA | 46 | 32961 | 32980 | 260 |
| 531158 | n/a | n/a | ACCTTACAAGCATCTTTTCC | 41 | 33223 | 33242 | 261 |
| 531159 | n/a | n/a | ATTTGTTAAAAGTTGCTTAT | 0 | 33368 | 33387 | 262 |
| 531160 | n/a | n/a | TGATATCATCATCCCAATGA | 13 | 33510 | 33529 | 263 |

TABLE 125

| | SEQ ID | SEQ ID | | | SEQ ID | SEQ ID | |
|---|---|---|---|---|---|---|---|
| | NO: 1 | NO: 1 | | | NO: 10 | NO: 10 | |
| ISIS | Start | Stop | | % | Start | Stop | SEQ |
| NO | Site | Site | Sequence | inhibition | Site | Site | ID NO |
| 531083 | n/a | n/a | TGTACTAGTTTCCTATAACT | 68 | 14738 | 14757 | 264 |
| | | | | | 14809 | 14828 | |
| | | | | | 14880 | 14899 | |
| | | | | | 14939 | 14958 | |
| | | | | | 15071 | 15090 | |
| | | | | | 15214 | 15233 | |
| | | | | | 15286 | 15305 | |
| | | | | | 15345 | 15364 | |
| | | | | | 15477 | 15496 | |
| | | | | | 15549 | 15568 | |
| | | | | | 15607 | 15626 | |
| | | | | | 15679 | 15698 | |
| | | | | | 15809 | 15828 | |
| | | | | | 15881 | 15900 | |
| | | | | | 15939 | 15958 | |
| 531161 | n/a | n/a | CAGACACCTTCTTCACAAGG | 40 | 898 | 917 | 264 |
| 531162 | n/a | n/a | AATTTCCCAGATGTATTAGT | 43 | 1054 | 1073 | 265 |
| 531163 | n/a | n/a | TCAGCAGAAATCATGTAGGC | 60 | 1181 | 1200 | 266 |
| 531164 | n/a | n/a | TTAAATATAAAGAGATCCTC | 38 | 1609 | 1628 | 267 |
| 531165 | n/a | n/a | GTAATAAAAGGAATGATAAA | 0 | 1825 | 1844 | 268 |
| 531166 | n/a | n/a | AGACAGTAAACAAAATCAGG | 12 | 2046 | 2065 | 269 |
| 531167 | n/a | n/a | CAAGAAACCACCAAAGGAAG | 37 | 2176 | 2195 | 270 |
| 531168 | n/a | n/a | ACCCCAACAGACAGCCCACC | 55 | 2314 | 2333 | 271 |
| 531169 | n/a | n/a | TGGGCTCACCCCAGTGGACC | 54 | 2580 | 2599 | 272 |
| 531170 | n/a | n/a | GCCTGGCCCCCAAGACTCTA | 54 | 2743 | 2762 | 273 |
| 531171 | n/a | n/a | AGGCCTGCCACAGGCCAGAC | 40 | 2873 | 2892 | 274 |
| 531172 | n/a | n/a | TTCAAGCCTGGGCAGCACAG | 71 | 3004 | 3023 | 275 |
| 531173 | n/a | n/a | AAAATAACTTCACTAGAGCT | 22 | 3131 | 3150 | 276 |
| 531174 | n/a | n/a | TGTTAAGTATATTAACTATT | 10 | 3256 | 3275 | 277 |
| 531175 | n/a | n/a | TACTCAGGAAATTAGAATAT | 25 | 3550 | 3569 | 278 |
| 531176 | n/a | n/a | TTATGAAACCTCTTGATTTG | 0 | 3753 | 3772 | 279 |
| 531177 | n/a | n/a | TTCTTGTAAATGTCTGAATT | 61 | 3971 | 3990 | 280 |
| 531178 | n/a | n/a | ACCACAGGAAACTGTAGCAA | 72 | 4111 | 4130 | 281 |
| 531179 | n/a | n/a | GATTGGACCCAGACACTATA | 57 | 4506 | 4525 | 282 |
| 531180 | n/a | n/a | CCTCTTAAGTCACCATAGAC | 45 | 4785 | 4804 | 283 |
| 531181 | n/a | n/a | GGTTGAGGGACAGACACAGG | 36 | 4940 | 4959 | 284 |
| 531182 | n/a | n/a | ATAATCATGATTTATTTTGC | 34 | 5099 | 5118 | 285 |
| 531183 | n/a | n/a | CATAAGAATGTGCACACAAA | 39 | 5382 | 5401 | 286 |
| 531184 | n/a | n/a | ACTCTTATTAGCTGGTAGAA | 74 | 5538 | 5557 | 287 |
| 531185 | n/a | n/a | GGACCAAAACTGAGAGGCAG | 63 | 5663 | 5682 | 288 |
| 531186 | n/a | n/a | CCATTACTCTCAAGCTCCAC | 75 | 5890 | 5909 | 289 |
| 531187 | n/a | n/a | ATCTATTGGTTCAGGAGCCA | 72 | 6015 | 6034 | 290 |
| 531188 | n/a | n/a | GTTAAAACAACTAGAAGCCA | 67 | 6146 | 6165 | 291 |
| 531189 | n/a | n/a | AGGTGTTCTTGCTTATCCTC | 63 | 6484 | 6503 | 292 |
| 531190 | n/a | n/a | GCAGTCACTCCTCTTCCAGC | 59 | 6659 | 6678 | 293 |
| 531191 | n/a | n/a | AAGTGTATTGCCTAGATTTC | 37 | 6784 | 6803 | 294 |
| 531192 | n/a | n/a | GAGTGCCATCTTCTCTGCAC | 61 | 6968 | 6987 | 295 |
| 531193 | n/a | n/a | TTATTCCCAGCTCTAAAATA | 23 | 7274 | 7293 | 296 |
| 531194 | n/a | n/a | CTCACAATTCTGTAAGGGAA | 64 | 7596 | 7615 | 297 |
| 531195 | n/a | n/a | ATAAAATATATTAAGGCAAC | 61 | 7846 | 7865 | 298 |
| 531196 | n/a | n/a | TTGAGTCAGACATCCTGTGA | 38 | 7996 | 8015 | 299 |
| 531197 | n/a | n/a | TACCTTTTCTCCATGTCATT | 42 | 8148 | 8167 | 300 |
| 531198 | n/a | n/a | GGGATTTTGCTGAAGCTGGT | 73 | 8273 | 8292 | 301 |
| 531199 | n/a | n/a | CTTTGAATAGAAAATGACTA | 1 | 8415 | 8434 | 302 |
| 531200 | n/a | n/a | CAAAATCACAAGTTCTAGAT | 51 | 8617 | 8636 | 303 |
| 531201 | n/a | n/a | TTTCCAATACTTTTACAAAT | 52 | 8760 | 8779 | 304 |
| 531202 | n/a | n/a | ATTAATAAGCATCTCTCTGA | 31 | 9109 | 9128 | 305 |
| 531203 | n/a | n/a | TGACTATCCAATTTCTAGTT | 67 | 9253 | 9272 | 306 |
| 531204 | n/a | n/a | CTTGTAGTCTGCACTTAATG | 60 | 9418 | 9437 | 307 |
| 531205 | n/a | n/a | ACATTTTTTAAGTACAGGAA | 0 | 9602 | 9621 | 308 |
| 531206 | n/a | n/a | GAAATGTCTAGCATTTTCTA | 28 | 9755 | 9774 | 309 |
| 531207 | n/a | n/a | CCACTTATTTGATGACCACA | 64 | 9915 | 9934 | 310 |
| 531208 | n/a | n/a | TCCAGAATACTGCCCCATCT | 23 | 10050 | 10069 | 311 |
| 531209 | n/a | n/a | TGGATTCATTTTCTGCAAAT | 81 | 10175 | 10194 | 312 |
| 531210 | n/a | n/a | AGACATTGTCAAATGTCCCC | 60 | 10322 | 10341 | 313 |
| 531211 | n/a | n/a | TTGATGTCAGCACTGTTGAC | 77 | 10480 | 10499 | 314 |
| 531212 | n/a | n/a | ACATCAGTAGCTTCAGATGT | 56 | 10618 | 10637 | 315 |
| 531213 | n/a | n/a | CAAAATTAATTGTGCATAAT | 13 | 10820 | 10839 | 316 |
| 531214 | n/a | n/a | TTTTTCTTTAAATTTTGCTA | 37 | 11120 | 11139 | 317 |
| 531215 | n/a | n/a | TAGAGATTTTATGTACTTGG | 63 | 11245 | 11264 | 318 |
| 531216 | n/a | n/a | AAACACAGGAATTTGCAGAC | 33 | 11408 | 11427 | 319 |
| 531217 | n/a | n/a | GTGGAATAAACCATAATCTA | 47 | 11579 | 11598 | 320 |
| 531218 | n/a | n/a | GATAATTCTTTTCACAGACA | 72 | 12028 | 12047 | 321 |
| 531219 | n/a | n/a | CTTCTCTATCTCCCAGTGTT | 61 | 12227 | 12246 | 322 |
| 531220 | n/a | n/a | CAATACAGGTAAATTTCACG | 56 | 12374 | 12393 | 323 |
| 531221 | n/a | n/a | AAGGGATTTAAAATTTTTAT | 0 | 12507 | 12526 | 324 |
| 531222 | n/a | n/a | GGCAAGCTGTACAAGAAAAA | 19 | 12642 | 12661 | 325 |
| 531223 | n/a | n/a | TGTACTCACCGGTACTCTGC | 58 | 12805 | 12824 | 326 |
| 531224 | n/a | n/a | AAGAGAATGCTCAGAAATGG | 25 | 13435 | 13454 | 327 |
| 531225 | n/a | n/a | ACACTTGTACCCCATACATC | 45 | 13560 | 13579 | 328 |
| 531226 | n/a | n/a | GACAGTAGAGACTGGGAAGG | 12 | 13708 | 13727 | 329 |
| 531227 | n/a | n/a | TACCAATTTCTGAAAGGGCA | 72 | 14224 | 14243 | 330 |
| 531228 | n/a | n/a | CAGAGTAAACTCCCCATCTC | 33 | 14387 | 14406 | 331 |
| 531229 | n/a | n/a | CTTCAAAGCCAGCAGTGTAA | 69 | 14514 | 14533 | 332 |
| 531230 | n/a | n/a | CTTACTGGGCTAAAATCAAG | 46 | 14639 | 14658 | 333 |
| 531231 | n/a | n/a | TATCACTGTACTAGTTTCCT | 94 | 14744 | 14763 | 334 |
| | | | | | 14815 | 14834 | |
| | | | | | 14886 | 14905 | |
| | | | | | 14945 | 14964 | |
| | | | | | 15005 | 15024 | |
| | | | | | 15077 | 15096 | |
| | | | | | 15220 | 15239 | |
| | | | | | 15292 | 15311 | |
| | | | | | 15351 | 15370 | |
| | | | | | 15411 | 15430 | |
| | | | | | 15483 | 15502 | |
| | | | | | 15555 | 15574 | |
| | | | | | 15613 | 15632 | |
| | | | | | 15685 | 15704 | |
| | | | | | 15815 | 15834 | |
| | | | | | 15887 | 15906 | |
| | | | | | 15945 | 15964 | |
| 531232 | n/a | n/a | CTGTACTAGTTTCCTATAAC | 85 | 14739 | 14758 | 335 |
| | | | | | 14810 | 14829 | |
| | | | | | 14881 | 14900 | |
| | | | | | 14940 | 14959 | |
| | | | | | 15000 | 15019 | |
| | | | | | 15072 | 15091 | |
| | | | | | 15215 | 15234 | |
| | | | | | 15287 | 15306 | |
| | | | | | 15346 | 15365 | |
| | | | | | 15406 | 15425 | |
| | | | | | 15478 | 15497 | |
| | | | | | 15550 | 15569 | |
| | | | | | 15608 | 15627 | |
| | | | | | 15680 | 15699 | |
| | | | | | 15810 | 15829 | |
| | | | | | 15882 | 15901 | |
| | | | | | 15940 | 15959 | |
| 531233 | n/a | n/a | ACTGTACTAGTTTCCTATAA | 86 | 14740 | 14759 | 336 |
| | | | | | 14811 | 14830 | |
| | | | | | 14882 | 14901 | |
| | | | | | 14941 | 14960 | |
| | | | | | 15001 | 15020 | |
| | | | | | 15073 | 15092 | |
| | | | | | 15216 | 15235 | |
| | | | | | 15288 | 15307 | |
| | | | | | 15347 | 15366 | |
| | | | | | 15407 | 15426 | |
| | | | | | 15479 | 15498 | |
| | | | | | 15551 | 15570 | |
| | | | | | 15609 | 15628 | |
| | | | | | 15681 | 15700 | |
| | | | | | 15811 | 15830 | |
| | | | | | 15883 | 15902 | |
| | | | | | 15941 | 15960 | |
| 531234 | n/a | n/a | CACTGTACTAGTTTCCTATA | 86 | 14741 | 14760 | 337 |
| | | | | | 14812 | 14831 | |
| | | | | | 14883 | 14902 | |
| | | | | | 14942 | 14960 | |
| | | | | | 15002 | 15021 | |
| | | | | | 15074 | 15093 | |
| | | | | | 15217 | 15236 | |
| | | | | | 15289 | 15308 | |
| | | | | | 15348 | 15367 | |
| | | | | | 15408 | 15427 | |
| | | | | | 15480 | 15499 | |
| | | | | | 15552 | 15571 | |
| | | | | | 15610 | 15627 | |
| | | | | | 15682 | 15701 | |
| | | | | | 15812 | 15831 | |
| | | | | | 15884 | 15903 | |
| | | | | | 15942 | 15961 | |
| 531235 | n/a | n/a | TCACTGTACTAGTTTCCTAT | 86 | 14742 | 14761 | 338 |
| | | | | | 14813 | 14832 | |
| | | | | | 14884 | 14903 | |
| | | | | | 14943 | 14962 | |
| | | | | | 15003 | 15022 | |
| | | | | | 15075 | 15094 | |
| | | | | | 15218 | 15237 | |
| | | | | | 15290 | 15309 | |
| | | | | | 15349 | 15368 | |
| | | | | | 15409 | 15428 | |
| | | | | | 15481 | 15500 | |
| | | | | | 15553 | 15572 | |
| | | | | | 15611 | 15630 | |
| | | | | | 15683 | 15702 | |
| | | | | | 15813 | 15832 | |
| | | | | | 15885 | 15904 | |
| | | | | | 15943 | 15962 | |
| 531236 | n/a | n/a | ATCACTGTACTAGTTTCCTA | 87 | 14743 | 14762 | 339 |
| | | | | | 14814 | 14833 | |
| | | | | | 14885 | 14904 | |
| | | | | | 14944 | 14963 | |
| | | | | | 5004 | 15023 | |
| | | | | | 15076 | 15095 | |
| | | | | | 15219 | 15238 | |
| | | | | | 15291 | 15310 | |
| | | | | | 15350 | 15369 | |
| | | | | | 15410 | 15429 | |
| | | | | | 15482 | 15501 | |
| | | | | | 15554 | 15573 | |
| | | | | | 15612 | 15631 | |
| | | | | | 15684 | 15703 | |
| | | | | | 15814 | 15833 | |
| | | | | | 15886 | 15905 | |
| | | | | | 15944 | 15963 | |
| 531237 | n/a | n/a | GTGGAATGTCATGGCAATTT | 56 | 16399 | 16418 | 340 |

### Example 115: Antisense Inhibition of Human PKK in HepaRG™ Cells by Antisense Oligonucleotides with 2′-MOE Sugar Modifications

[1076] Additional antisense oligonucleotides were designed targeting a PKK nucleic acid and were tested for their effects on PKK mRNA in vitro.

[1077] The chimeric antisense oligonucleotides in the tables below were designed as 5-10-5 MOE gapmers, 4-9-4 MOE gapmers, 4-10-4 MOE gapmers, 4-10-3 MOE gapmers, 3-10-4 MOE gapmers, or 3-10-3 MOE gapmers. The 5-10-5 MOE gapmers are 20 nucleosides in length, wherein the central gap segment comprises of ten 2′-deoxynucleosides and is flanked by wing segments on the 5′ direction and the 3′ direction comprising five nucleosides each. The 4-9-4 MOE gapmers are 17 nucleosides in length, wherein the central gap segment comprises of nine 2′-deoxynucleosides and is flanked by wing segments on the 5′ direction and the 3′ direction comprising four nucleosides each. The 4-10-4 MOE gapmers are 18 nucleosides in length, wherein the central gap segment comprises of ten 2′-deoxynucleosides and is flanked by wing segments on the 5′ direction and the 3′ direction comprising four nucleosides each. The 4-10-3 MOE gapmers are 17 nucleosides in length, wherein the central gap segment comprises of ten 2′-deoxynucleosides and is flanked by wing segments on the 5′ direction and the 3′ direction comprising four and three nucleosides respectively. The 3-10-4 MOE gapmers are 17 nucleosides in length, wherein the central gap segment comprises of ten 2′-deoxynucleosides and is flanked by wing segments on the 5′ direction and the 3′ direction comprising three and four nucleosides respectively. The 3-10-3 MOE gapmers are 16 nucleosides in length, wherein the central gap segment comprises of ten 2′-deoxynucleosides and is flanked by wing segments on the 5′ direction and the 3′ direction comprising three nucleosides each. Each nucleoside in the 5′ wing segment and each nucleoside in the 3′ wing segment has a 2′-O-methoxyethyl modification. The internucleoside linkages throughout each gapmer are phosphorothioate linkages. All cytosine residues throughout each gapmer are 5-methylcytosines. “Start site” indicates the 5′-most nucleoside to which the gapmer is targeted in the human gene sequence. “Stop site” indicates the 3′-most nucleoside to which the gapmer is targeted in the human gene sequence. Each gapmer listed in the tables below is targeted to either SEQ ID NO: 1 or SEQ ID NO: 10. ‘n/a’ indicates that the antisense oligonucleotide does not target that particular gene sequence. Cultured HepaRG™ cells at a density of 20,000 cells per well were transfected using electroporation with 5,000 nM antisense oligonucleotide. After a treatment period of approximately 24 hours, RNA was isolated from the cells and PKK mRNA levels were measured by quantitative real-time PCR. Human primer probe set RTS3454 was used to measure mRNA levels. PKK mRNA levels were adjusted according to total RNA content, as measured by RIBOGREEN®. The antisense oligonucleotides were tested in a series of experiments that had similar culture conditions. The results for each experiment are presented in separate tables shown below. Results are presented as percent inhibition of PKK, relative to untreated control cells.

TABLE 126

| | SEQ ID | SEQ ID | | | | SEQ ID | SEQ ID | |
|---|---|---|---|---|---|---|---|---|
| | NO: 1 | NO: 1 | | | | NO: 10 | NO: 10 | |
| ISIS | Start | Stop | | | % | Start | Stop | SEQ |
| NO | Site | Site | Sequence | Motif | inhibition | Site | Site | ID NO |
| 531231 | n/a | n/a | TATCACTGTACTAGTTTCCT | 5-10-5 | 98 | 14744 | 14763 | 334 |
| | | | | | | 14815 | 14834 | |
| | | | | | | 14886 | 14905 | |
| | | | | | | 14945 | 14964 | |
| | | | | | | 15005 | 15024 | |
| | | | | | | 15077 | 15096 | |
| | | | | | | 15220 | 15239 | |
| | | | | | | 15292 | 15311 | |
| | | | | | | 15351 | 15370 | |
| | | | | | | 15411 | 15430 | |
| | | | | | | 15483 | 15502 | |
| | | | | | | 15555 | 15574 | |
| | | | | | | 15613 | 15632 | |
| | | | | | | 15685 | 15704 | |
| | | | | | | 15815 | 15834 | |
| | | | | | | 15887 | 15906 | |
| | | | | | | 15945 | 15964 | |
| 546131 | 4 | 23 | ATGAACGGTCTTCAAGCTGT | 5-10-5 | 75 | 3396 | 3415 | 341 |
| 547269 | 5 | 24 | AATGAACGGTCTTCAAGCTG | 5-10-5 | 56 | 3397 | 3416 | 342 |
| 547270 | 7 | 26 | AAAATGAACGGTCTTCAAGC | 5-10-5 | 68 | 3399 | 3418 | 343 |
| 547271 | 10 | 29 | TTAAAAATGAACGGTCTTCA | 5-10-5 | 60 | 3402 | 3421 | 344 |
| 547272 | 13 | 32 | CACTTAAAAATGAACGGTCT | 5-10-5 | 82 | 3405 | 3424 | 345 |
| 547273 | 25 | 44 | TGAGTCTCTTGTCACTTAAA | 5-10-5 | 93 | 3417 | 3436 | 346 |
| 547274 | 29 | 48 | GAGGTGAGTCTCTTGTCACT | 5-10-5 | 70 | 3421 | 3440 | 347 |
| 546136 | 30 | 49 | GGAGGTGAGTCTCTTGTCAC | 5-10-5 | 86 | 3422 | 3441 | 348 |
| 547275 | 32 | 51 | TTGGAGGTGAGTCTCTTGTC | 5-10-5 | 87 | 3424 | 3443 | 349 |
| 546137 | 40 | 59 | ATTGCTTCTTGGAGGTGAGT | 5-10-5 | 76 | 3432 | 3451 | 350 |
| 547276 | 42 | 61 | CAATTGCTTCTTGGAGGTGA | 5-10-5 | 93 | 3434 | 3453 | 351 |
| 547277 | 44 | 63 | CACAATTGCTTCTTGGAGGT | 5-10-5 | 75 | 3436 | 3455 | 352 |
| 547278 | 45 | 64 | ACACAATTGCTTCTTGGAGG | 5-10-5 | 70 | 3437 | 3456 | 353 |
| 546138 | 47 | 66 | AAACACAATTGCTTCTTGGA | 5-10-5 | 69 | 3439 | 3458 | 354 |
| 547279 | 48 | 67 | AAAACACAATTGCTTCTTGG | 5-10-5 | 69 | 3440 | 3459 | 355 |
| 547280 | 49 | 68 | GAAAACACAATTGCTTCTTG | 5-10-5 | 47 | 3441 | 3460 | 356 |
| 547281 | 70 | 89 | TTGCTTGAATAAAATCATTC | 5-10-5 | 41 | 4069 | 4088 | 357 |
| 546140 | 72 | 91 | GCTTGCTTGAATAAAATCAT | 5-10-5 | 60 | 4071 | 4090 | 358 |
| 547282 | 74 | 93 | TTGCTTGCTTGAATAAAATC | 5-10-5 | 53 | 4073 | 4092 | 359 |
| 547283 | 76 | 95 | AGTTGCTTGCTTGAATAAAA | 5-10-5 | 67 | 4075 | 4094 | 360 |
| 546141 | 82 | 101 | GAAATAAGTTGCTTGCTTGA | 5-10-5 | 56 | 4081 | 4100 | 361 |
| 547284 | 86 | 105 | AAATGAAATAAGTTGCTTGC | 5-10-5 | 26 | 4085 | 4104 | 362 |
| 547285 | 102 | 121 | ACTGTAGCAAACAAGGAAAT | 5-10-5 | 51 | 4101 | 4120 | 363 |
| 546143 | 106 | 125 | GGAAACTGTAGCAAACAAGG | 5-10-5 | 46 | 4105 | 4124 | 364 |
| 546144 | 110 | 129 | CACAGGAAACTGTAGCAAAC | 5-10-5 | 75 | 4109 | 4128 | 365 |
| 547286 | 117 | 136 | AGACATCCACAGGAAACTGT | 5-10-5 | 68 | n/a | n/a | 366 |
| 547287 | 120 | 139 | GTCAGACATCCACAGGAAAC | 5-10-5 | 69 | n/a | n/a | 367 |
| 546146 | 123 | 142 | TGAGTCAGACATCCACAGGA | 5-10-5 | 72 | n/a | n/a | 368 |
| 547288 | 131 | 150 | CATAGAGTTGAGTCAGACAT | 5-10-5 | 80 | 8003 | 8022 | 369 |
| 546147 | 132 | 151 | TCATAGAGTTGAGTCAGACA | 5-10-5 | 76 | 8004 | 8023 | 370 |
| 547289 | 133 | 152 | TTCATAGAGTTGAGTCAGAC | 5-10-5 | 74 | 8005 | 8024 | 371 |
| 546148 | 137 | 156 | CGTTTTCATAGAGTTGAGTC | 5-10-5 | 68 | 8009 | 8028 | 372 |
| 546149 | 155 | 174 | CCCCACCTCTGAAGAAGGCG | 5-10-5 | 83 | 8027 | 8046 | 373 |
| 546150 | 158 | 177 | CATCCCCACCTCTGAAGAAG | 5-10-5 | 58 | 8030 | 8049 | 374 |
| 547290 | 163 | 182 | AGCTACATCCCCACCTCTGA | 5-10-5 | 76 | 8035 | 8054 | 375 |
| 546151 | 166 | 185 | GGAAGCTACATCCCCACCTC | 5-10-5 | 76 | 8038 | 8057 | 376 |
| 547291 | 168 | 187 | ATGGAAGCTACATCCCCACC | 5-10-5 | 74 | 8040 | 8059 | 377 |
| 547292 | 171 | 190 | TACATGGAAGCTACATCCCC | 5-10-5 | 60 | 8043 | 8062 | 378 |
| 546152 | 172 | 191 | GTACATGGAAGCTACATCCC | 5-10-5 | 73 | 8044 | 8063 | 379 |
| 546153 | 176 | 195 | GGGTGTACATGGAAGCTACA | 5-10-5 | 76 | 8048 | 8067 | 380 |
| 546154 | 195 | 214 | TGGCAGTATTGGGCATTTGG | 5-10-5 | 85 | 8067 | 8086 | 381 |
| 547293 | 199 | 218 | CATCTGGCAGTATTGGGCAT | 5-10-5 | 92 | 8071 | 8090 | 382 |
| 547294 | 201 | 220 | CTCATCTGGCAGTATTGGGC | 5-10-5 | 85 | 8073 | 8092 | 383 |
| 546155 | 202 | 221 | CCTCATCTGGCAGTATTGGG | 5-10-5 | 47 | 8074 | 8093 | 384 |
| 547295 | 203 | 222 | ACCTCATCTGGCAGTATTGG | 5-10-5 | 88 | 8075 | 8094 | 385 |
| 547296 | 206 | 225 | TGCACCTCATCTGGCAGTAT | 5-10-5 | 72 | 8078 | 8097 | 386 |
| 546156 | 211 | 230 | GAATGTGCACCTCATCTGGC | 5-10-5 | 81 | 8083 | 8102 | 387 |
| 547297 | 213 | 232 | TGGAATGTGCACCTCATCTG | 5-10-5 | 84 | 8085 | 8104 | 388 |
| 546157 | 216 | 235 | GGGTGGAATGTGCACCTCAT | 5-10-5 | 85 | 8088 | 8107 | 389 |
| 547298 | 218 | 237 | TTGGGTGGAATGTGCACCTC | 5-10-5 | 90 | 8090 | 8109 | 390 |
| 546158 | 219 | 238 | CTTGGGTGGAATGTGCACCT | 5-10-5 | 95 | 8091 | 8110 | 391 |
| 546159 | 229 | 248 | TAGCAAACACCTTGGGTGGA | 5-10-5 | 76 | 8101 | 8120 | 392 |
| 546160 | 235 | 254 | ACTGAATAGCAAACACCTTG | 5-10-5 | 78 | 8107 | 8126 | 393 |
| 547299 | 237 | 256 | AAACTGAATAGCAAACACCT | 5-10-5 | 76 | 8109 | 8128 | 394 |
| 546163 | 250 | 269 | ACTTGCTGGAAGAAAACTGA | 5-10-5 | 42 | 8122 | 8141 | 395 |
| 547300 | 252 | 271 | GAACTTGCTGGAAGAAAACT | 5-10-5 | 37 | 8124 | 8143 | 396 |
| 546164 | 257 | 276 | TGATTGAACTTGCTGGAAGA | 5-10-5 | 33 | 8129 | 8148 | 397 |
| 546165 | 260 | 279 | CATTGATTGAACTTGCTGGA | 5-10-5 | 71 | 8132 | 8151 | 398 |
| 547301 | 261 | 280 | TCATTGATTGAACTTGCTGG | 5-10-5 | 80 | 8133 | 8152 | 399 |
| 546166 | 263 | 282 | TGTCATTGATTGAACTTGCT | 5-10-5 | 70 | 8135 | 8154 | 400 |
| 547302 | 266 | 285 | CCATGTCATTGATTGAACTT | 5-10-5 | 58 | 8138 | 8157 | 401 |
| 546167 | 268 | 287 | CTCCATGTCATTGATTGAAC | 5-10-5 | 73 | 8140 | 8159 | 402 |
| 547303 | 270 | 289 | TTCTCCATGTCATTGATTGA | 5-10-5 | 72 | 8142 | 8161 | 403 |
| 547304 | 273 | 292 | CTTTTCTCCATGTCATTGAT | 5-10-5 | 71 | 8145 | 8164 | 404 |
| 547305 | 280 | 299 | ACCAAACCTTTTCTCCATGT | 5-10-5 | 47 | n/a | n/a | 405 |
| 546170 | 283 | 302 | GCAACCAAACCTTTTCTCCA | 5-10-5 | 54 | n/a | n/a | 406 |
| 547306 | 284 | 303 | AGCAACCAAACCTTTTCTCC | 5-10-5 | 62 | n/a | n/a | 407 |
| 547307 | 286 | 305 | GAAGCAACCAAACCTTTTCT | 5-10-5 | 58 | n/a | n/a | 408 |
| 547308 | 290 | 309 | TCAAGAAGCAACCAAACCTT | 5-10-5 | 66 | n/a | n/a | 409 |
| 547309 | 293 | 312 | CTTTCAAGAAGCAACCAAAC | 5-10-5 | 71 | 9827 | 9846 | 410 |
| 547310 | 295 | 314 | ATCTTTCAAGAAGCAACCAA | 5-10-5 | 81 | 9829 | 9848 | 411 |
| 546171 | 297 | 316 | CTATCTTTCAAGAAGCAACC | 5-10-5 | 81 | 9831 | 9850 | 412 |
| 547311 | 299 | 318 | CACTATCTTTCAAGAAGCAA | 5-10-5 | 71 | 9833 | 9852 | 413 |
| 546172 | 301 | 320 | AACACTATCTTTCAAGAAGC | 5-10-5 | 81 | 9835 | 9854 | 414 |
| 547312 | 325 | 344 | ATGTACTTTTGGCAGGGTTC | 5-10-5 | 46 | 9859 | 9878 | 415 |
| 546173 | 327 | 346 | CGATGTACTTTTGGCAGGGT | 5-10-5 | 84 | 9861 | 9880 | 416 |
| 547313 | 330 | 349 | GTTCGATGTACTTTTGGCAG | 5-10-5 | 73 | 9864 | 9883 | 417 |

TABLE 127

| | SEQ ID | SEQ ID | | | | SEQ ID | SEQ ID | |
|---|---|---|---|---|---|---|---|---|
| | NO: 1 | NO: 1 | | | | NO: 10 | NO: 10 | |
| ISIS | Start | Stop | | | % | Start | Stop | SEQ |
| NO | Site | Site | Sequence | Motif | inhibition | Site | Site | ID NO |
| 531231 | n/a | n/a | TATCACTGTACTAGTTTCCT | 5-10-5 | 86 | 14744 | 14763 | 334 |
| | | | | | | 14815 | 14834 | |
| | | | | | | 14886 | 14905 | |
| | | | | | | 14945 | 14964 | |
| | | | | | | 15005 | 15024 | |
| | | | | | | 15077 | 15096 | |
| | | | | | | 15220 | 15239 | |
| | | | | | | 15292 | 15311 | |
| | | | | | | 15351 | 15370 | |
| | | | | | | 15411 | 15430 | |
| | | | | | | 15483 | 15502 | |
| | | | | | | 15555 | 15574 | |
| | | | | | | 15613 | 15632 | |
| | | | | | | 15685 | 15704 | |
| | | | | | | 15815 | 15834 | |
| | | | | | | 15887 | 15906 | |
| | | | | | | 15945 | 15964 | |
| 546174 | 333 | 352 | CCTGTTCGATGTACTTTTGG | 5-10-5 | 74 | 9867 | 9886 | 418 |
| 547314 | 336 | 355 | GCACCTGTTCGATGTACTTT | 5-10-5 | 73 | 9870 | 9889 | 419 |
| 546175 | 338 | 357 | CTGCACCTGTTCGATGTACT | 5-10-5 | 78 | 9872 | 9891 | 420 |
| 547315 | 340 | 359 | AACTGCACCTGTTCGATGTA | 5-10-5 | 50 | 9874 | 9893 | 421 |
| 547316 | 342 | 361 | GAAACTGCACCTGTTCGATG | 5-10-5 | 75 | 9876 | 9895 | 422 |
| 547317 | 344 | 363 | CAGAAACTGCACCTGTTCGA | 5-10-5 | 75 | 9878 | 9897 | 423 |
| 547318 | 345 | 364 | CCAGAAACTGCACCTGTTCG | 5-10-5 | 74 | 9879 | 9898 | 424 |
| 546177 | 348 | 367 | TGTCCAGAAACTGCACCTGT | 5-10-5 | 75 | 9882 | 9901 | 425 |
| 547319 | 351 | 370 | GAATGTCCAGAAACTGCACC | 5-10-5 | 62 | 9885 | 9904 | 426 |
| 547320 | 353 | 372 | AGGAATGTCCAGAAACTGCA | 5-10-5 | 73 | 9887 | 9906 | 427 |
| 547321 | 356 | 375 | TCAAGGAATGTCCAGAAACT | 5-10-5 | 53 | 9890 | 9909 | 428 |
| 547322 | 358 | 377 | CTTCAAGGAATGTCCAGAAA | 5-10-5 | 65 | 9892 | 9911 | 429 |
| 547323 | 361 | 380 | TTGCTTCAAGGAATGTCCAG | 5-10-5 | 56 | 9895 | 9914 | 430 |
| 547324 | 363 | 382 | CATTGCTTCAAGGAATGTCC | 5-10-5 | 76 | 9897 | 9916 | 431 |
| 547325 | 368 | 387 | GACCACATTGCTTCAAGGAA | 5-10-5 | 67 | 9902 | 9921 | 432 |
| 546181 | 369 | 388 | TGACCACATTGCTTCAAGGA | 5-10-5 | 75 | 9903 | 9922 | 433 |
| 547326 | 370 | 389 | ATGACCACATTGCTTCAAGG | 5-10-5 | 48 | 9904 | 9923 | 434 |
| 547327 | 373 | 392 | TTGATGACCACATTGCTTCA | 5-10-5 | 45 | 9907 | 9926 | 435 |
| 547328 | 375 | 394 | ATTTGATGACCACATTGCTT | 5-10-5 | 40 | 9909 | 9928 | 436 |
| 547329 | 377 | 396 | TTATTTGATGACCACATTGC | 5-10-5 | 24 | 9911 | 9930 | 437 |
| 547330 | 378 | 397 | CTTATTTGATGACCACATTG | 5-10-5 | 60 | 9912 | 9931 | 438 |
| 546183 | 380 | 399 | CACTTATTTGATGACCACAT | 5-10-5 | 69 | 9914 | 9933 | 439 |
| 547331 | 382 | 401 | AGCACTTATTTGATGACCAC | 5-10-5 | 47 | n/a | n/a | 440 |
| 546184 | 384 | 403 | CAAGCACTTATTTGATGACC | 5-10-5 | 65 | n/a | n/a | 441 |
| 547332 | 390 | 409 | CGATGGCAAGCACTTATTTG | 5-10-5 | 44 | n/a | n/a | 442 |
| 547333 | 395 | 414 | TGTCTCGATGGCAAGCACTT | 5-10-5 | 76 | n/a | n/a | 443 |
| 546186 | 396 | 415 | ATGTCTCGATGGCAAGCACT | 5-10-5 | 84 | n/a | n/a | 444 |
| 547334 | 397 | 416 | AATGTCTCGATGGCAAGCAC | 5-10-5 | 74 | n/a | n/a | 445 |
| 547335 | 402 | 421 | TTATAAATGTCTCGATGGCA | 5-10-5 | 93 | 12658 | 12677 | 446 |
| 547336 | 403 | 422 | TTTATAAATGTCTCGATGGC | 5-10-5 | 81 | 12659 | 12678 | 447 |
| 546188 | 407 | 426 | CTCCTTTATAAATGTCTCGA | 5-10-5 | 95 | 12663 | 12682 | 448 |
| 547337 | 409 | 428 | AACTCCTTTATAAATGTCTC | 5-10-5 | 84 | 12665 | 12684 | 449 |
| 547338 | 411 | 430 | TCAACTCCTTTATAAATGTC | 5-10-5 | 71 | 12667 | 12686 | 450 |
| 547339 | 413 | 432 | TATCAACTCCTTTATAAATG | 5-10-5 | 42 | 12669 | 12688 | 451 |
| 546190 | 419 | 438 | CTCTCATATCAACTCCTTTA | 5-10-5 | 92 | 12675 | 12694 | 452 |
| 547340 | 422 | 441 | CTCCTCTCATATCAACTCCT | 5-10-5 | 93 | 12678 | 12697 | 453 |
| 547341 | 424 | 443 | GACTCCTCTCATATCAACTC | 5-10-5 | 87 | 12680 | 12699 | 454 |
| 546192 | 428 | 447 | AATTGACTCCTCTCATATCA | 5-10-5 | 51 | 12684 | 12703 | 455 |
| 547342 | 433 | 452 | ATTAAAATTGACTCCTCTCA | 5-10-5 | 66 | 12689 | 12708 | 456 |
| 546193 | 434 | 453 | CATTAAAATTGACTCCTCTC | 5-10-5 | 57 | 12690 | 12709 | 457 |
| 547343 | 436 | 455 | CACATTAAAATTGACTCCTC | 5-10-5 | 78 | 12692 | 12711 | 458 |
| 547344 | 438 | 457 | GACACATTAAAATTGACTCC | 5-10-5 | 80 | 12694 | 12713 | 459 |
| 547345 | 439 | 458 | AGACACATTAAAATTGACTC | 5-10-5 | 80 | 12695 | 12714 | 460 |
| 547346 | 444 | 463 | ACCTTAGACACATTAAAATT | 5-10-5 | 57 | 12700 | 12719 | 461 |
| 546195 | 448 | 467 | GCTAACCTTAGACACATTAA | 5-10-5 | 83 | 12704 | 12723 | 462 |
| 547347 | 451 | 470 | ACTGCTAACCTTAGACACAT | 5-10-5 | 82 | 12707 | 12726 | 463 |
| 546196 | 452 | 471 | CACTGCTAACCTTAGACACA | 5-10-5 | 83 | 12708 | 12727 | 464 |
| 547348 | 453 | 472 | ACACTGCTAACCTTAGACAC | 5-10-5 | 83 | 12709 | 12728 | 465 |
| 547349 | 458 | 477 | CTTCAACACTGCTAACCTTA | 5-10-5 | 88 | 12714 | 12733 | 466 |
| 546198 | 459 | 478 | TCTTCAACACTGCTAACCTT | 5-10-5 | 85 | 12715 | 12734 | 467 |
| 547350 | 464 | 483 | GGCATTCTTCAACACTGCTA | 5-10-5 | 96 | 12720 | 12739 | 468 |
| 546199 | 465 | 484 | TGGCATTCTTCAACACTGCT | 5-10-5 | 97 | 12721 | 12740 | 469 |
| 547351 | 467 | 486 | TTTGGCATTCTTCAACACTG | 5-10-5 | 92 | 12723 | 12742 | 470 |
| 546200 | 500 | 519 | AAAACTGGCAGCGAATGTTA | 5-10-5 | 91 | 12756 | 12775 | 471 |
| 547352 | 541 | 560 | CCGGTACTCTGCCTTGTGAA | 5-10-5 | 94 | 12797 | 12816 | 472 |
| 547354 | 547 | 566 | ATTGTTCCGGTACTCTGCCT | 5-10-5 | 89 | n/a | n/a | 473 |
| 546203 | 548 | 567 | AATTGTTCCGGTACTCTGCC | 5-10-5 | 76 | n/a | n/a | 474 |
| 547355 | 549 | 568 | CAATTGTTCCGGTACTCTGC | 5-10-5 | 77 | n/a | n/a | 475 |
| 546204 | 555 | 574 | AATAGGCAATTGTTCCGGTA | 5-10-5 | 91 | n/a | n/a | 476 |
| 547356 | 556 | 575 | TAATAGGCAATTGTTCCGGT | 5-10-5 | 83 | n/a | n/a | 477 |
| 547357 | 559 | 578 | CTTTAATAGGCAATTGTTCC | 5-10-5 | 78 | 14130 | 14149 | 478 |
| 546205 | 562 | 581 | GTACTTTAATAGGCAATTGT | 5-10-5 | 83 | 14133 | 14152 | 479 |
| 547359 | 569 | 588 | CGGGACTGTACTTTAATAGG | 5-10-5 | 81 | 14140 | 14159 | 480 |
| 546208 | 605 | 624 | CGTTACTCAGCACCTTTATA | 5-10-5 | 92 | 14176 | 14195 | 481 |
| 546209 | 629 | 648 | GCTTCAGTGAGAATCCAGAT | 5-10-5 | 73 | 14200 | 14219 | 482 |
| 546210 | 651 | 670 | CCAATTTCTGAAAGGGCACA | 5-10-5 | 79 | 14222 | 14241 | 483 |
| 547360 | 653 | 672 | AACCAATTTCTGAAAGGGCA | 5-10-5 | 88 | n/a | n/a | 484 |
| 547361 | 655 | 674 | GCAACCAATTTCTGAAAGGG | 5-10-5 | 46 | n/a | n/a | 485 |
| 546211 | 656 | 675 | GGCAACCAATTTCTGAAAGG | 5-10-5 | 42 | n/a | n/a | 486 |
| 546212 | 678 | 697 | AGATGCTGGAAGATGTTCAT | 5-10-5 | 48 | 26126 | 26145 | 487 |
| 547362 | 701 | 720 | CAACATCCACATCTGAGAAC | 5-10-5 | 47 | 26149 | 26168 | 488 |
| 547363 | 703 | 722 | GGCAACATCCACATCTGAGA | 5-10-5 | 84 | 26151 | 26170 | 489 |
| 546213 | 707 | 726 | CCCTGGCAACATCCACATCT | 5-10-5 | 82 | 26155 | 26174 | 490 |

TABLE 128

| | SEQ ID | SEQ ID | | | | SEQ ID | SEQ ID | |
|---|---|---|---|---|---|---|---|---|
| | NO: 1 | NO: 1 | | | | NO: 10 | NO: 10 | |
| ISIS | Start | Stop | | | % | Start | Stop | SEQ |
| NO | Site | Site | Sequence | Motif | inhibition | Site | Site | ID NO |
| 531231 | n/a | n/a | TATCACTGTACTAGTTTCCT | 5-10-5 | 88 | 14744 | 14763 | 334 |
| | | | | | | 14815 | 14834 | |
| | | | | | | 14886 | 14905 | |
| | | | | | | 14945 | 14964 | |
| | | | | | | 15005 | 15024 | |
| | | | | | | 15077 | 15096 | |
| | | | | | | 15220 | 15239 | |
| | | | | | | 15292 | 15311 | |
| | | | | | | 15351 | 15370 | |
| | | | | | | 15411 | 15430 | |
| | | | | | | 15483 | 15502 | |
| | | | | | | 15555 | 15571 | |
| | | | | | | 15613 | 15632 | |
| | | | | | | 15685 | 15704 | |
| | | | | | | 15815 | 15834 | |
| | | | | | | 15887 | 15906 | |
| | | | | | | 15945 | 15964 | |
| 547364 | 710 | 729 | GAACCCTGGCAACATCCACA | 5-10-5 | 92 | 26158 | 26177 | 491 |
| 546214 | 712 | 731 | GAGAACCCTGGCAACATCCA | 5-10-5 | 88 | 26160 | 26179 | 492 |
| 547365 | 713 | 732 | TGAGAACCCTGGCAACATCC | 5-10-5 | 81 | 26161 | 26180 | 493 |
| 547366 | 717 | 736 | GGAGTGAGAACCCTGGCAAC | 5-10-5 | 86 | 26165 | 26184 | 494 |
| 546216 | 719 | 738 | CTGGAGTGAGAACCCTGGCA | 5-10-5 | 93 | 26167 | 26186 | 495 |
| 547367 | 721 | 740 | ATCTGGAGTGAGAACCCTGG | 5-10-5 | 76 | 26169 | 26188 | 496 |
| 547368 | 723 | 742 | GCATCTGGAGTGAGAACCCT | 5-10-5 | 89 | 26171 | 26190 | 497 |
| 547369 | 725 | 744 | AAGCATCTGGAGTGAGAACC | 5-10-5 | 76 | 26173 | 26192 | 498 |
| 547370 | 728 | 747 | CAAAAGCATCTGGAGTGAGA | 5-10-5 | 73 | 26176 | 26195 | 499 |
| 546217 | 730 | 749 | CACAAAAGCATCTGGAGTGA | 5-10-5 | 83 | 26178 | 26197 | 500 |
| 546218 | 740 | 759 | TGGTCCGACACACAAAAGCA | 5-10-5 | 71 | 26188 | 26207 | 501 |
| 547371 | 741 | 760 | ATGGTCCGACACACAAAAGC | 5-10-5 | 66 | 26189 | 26208 | 502 |
| 547372 | 742 | 761 | GATGGTCCGACACACAAAAG | 5-10-5 | 32 | 26190 | 26209 | 503 |
| 547373 | 745 | 764 | GCAGATGGTCCGACACACAA | 5-10-5 | 90 | 26193 | 26212 | 504 |
| 546220 | 750 | 769 | TAGGTGCAGATGGTCCGACA | 5-10-5 | 71 | 26198 | 26217 | 505 |
| 547374 | 752 | 771 | GATAGGTGCAGATGGTCCGA | 5-10-5 | 81 | 26200 | 26219 | 506 |
| 547375 | 754 | 773 | GTGATAGGTGCAGATGGTCC | 5-10-5 | 72 | 26202 | 26221 | 507 |
| 546222 | 756 | 775 | GGGTGATAGGTGCAGATGGT | 5-10-5 | 12 | 26204 | 26223 | 508 |
| 547376 | 778 | 797 | GAATGTAAAGAAGAGGCAGT | 5-10-5 | 43 | 26226 | 26245 | 509 |
| 546224 | 780 | 799 | TAGAATGTAAAGAAGAGGCA | 5-10-5 | 65 | 26228 | 26247 | 510 |
| 547377 | 788 | 807 | CATTTGTATAGAATGTAAAG | 5-10-5 | 6 | 26236 | 26255 | 511 |
| 547378 | 790 | 809 | TACATTTGTATAGAATGTAA | 5-10-5 | 0 | 26238 | 26257 | 512 |
| 546226 | 793 | 812 | CCATACATTTGTATAGAATG | 5-10-5 | 37 | 26241 | 26260 | 513 |
| 547379 | 802 | 821 | CTCGATTTTCCATACATTTG | 5-10-5 | 37 | 26250 | 26269 | 514 |
| 547380 | 805 | 824 | TGACTCGATTTTCCATACAT | 5-10-5 | 42 | 26253 | 26272 | 515 |
| 546228 | 806 | 825 | GTGACTCGATTTTCCATACA | 5-10-5 | 60 | 26254 | 26273 | 516 |
| 547381 | 807 | 826 | TGTGACTCGATTTTCCATAC | 5-10-5 | 49 | 26255 | 26274 | 517 |
| 547382 | 810 | 829 | CTTTGTGACTCGATTTTCCA | 5-10-5 | 62 | 26258 | 26277 | 518 |
| 547383 | 812 | 831 | TTCTTTGTGACTCGATTTTC | 5-10-5 | 37 | n/a | n/a | 519 |
| 546229 | 816 | 835 | ACATTTCTTTGTGACTCGAT | 5-10-5 | 19 | n/a | n/a | 520 |
| 547384 | 818 | 837 | AAACATTTCTTTGTGACTCG | 5-10-5 | 50 | n/a | n/a | 521 |
| 547385 | 847 | 866 | TGTGCCACTTTCAGATGTTT | 5-10-5 | 80 | 27111 | 27130 | 522 |
| 546230 | 848 | 867 | GTGTGCCACTTTCAGATGTT | 5-10-5 | 70 | 27112 | 27131 | 523 |
| 546231 | 852 | 871 | CTTGGTGTGCCACTTTCAGA | 5-10-5 | 79 | 27116 | 27135 | 524 |
| 547386 | 853 | 872 | ACTTGGTGTGCCACTTTCAG | 5-10-5 | 78 | 27117 | 27136 | 525 |
| 546232 | 857 | 876 | AGGAACTTGGTGTGCCACTT | 5-10-5 | 86 | 27121 | 27140 | 526 |
| 547387 | 878 | 897 | TGGTGTTTTCTTGAGGAGTA | 5-10-5 | 73 | 27142 | 27161 | 527 |
| 546233 | 879 | 898 | ATGGTGTTTTCTTGAGGAGT | 5-10-5 | 69 | 27143 | 27162 | 528 |
| 547388 | 880 | 899 | TATGGTGTTTTCTTGAGGAG | 5-10-5 | 55 | 27144 | 27163 | 529 |
| 547389 | 884 | 903 | CAGATATGGTGTTTTCTTGA | 5-10-5 | 61 | 27148 | 27167 | 530 |
| 546234 | 885 | 904 | CCAGATATGGTGTTTTCTTG | 5-10-5 | 69 | 27149 | 27168 | 531 |
| 547390 | 887 | 906 | ATCCAGATATGGTGTTTTCT | 5-10-5 | 63 | 27151 | 27170 | 532 |
| 547391 | 889 | 908 | ATATCCAGATATGGTGTTTT | 5-10-5 | 32 | 27153 | 27172 | 533 |
| 546235 | 893 | 912 | GGCTATATCCAGATATGGTG | 5-10-5 | 77 | 27157 | 27176 | 534 |
| 547392 | 895 | 914 | AAGGCTATATCCAGATATGG | 5-10-5 | 81 | 27159 | 27178 | 535 |
| 546236 | 900 | 919 | GTTAAAAGGCTATATCCAGA | 5-10-5 | 50 | 27164 | 27183 | 536 |
| 546237 | 903 | 922 | CAGGTTAAAAGGCTATATCC | 5-10-5 | 64 | 27167 | 27186 | 537 |
| 547393 | 905 | 924 | TGCAGGTTAAAAGGCTATAT | 5-10-5 | 73 | 27169 | 27188 | 538 |
| 547394 | 907 | 926 | TTTGCAGGTTAAAAGGCTAT | 5-10-5 | 29 | 27171 | 27190 | 539 |
| 546238 | 909 | 928 | CTTTTGCAGGTTAAAAGGCT | 5-10-5 | 63 | 27173 | 27192 | 540 |
| 546239 | 912 | 931 | GTTCTTTTGCAGGTTAAAAG | 5-10-5 | 47 | 27176 | 27195 | 541 |
| 547395 | 914 | 933 | AAGTTCTTTTGCAGGTTAAA | 5-10-5 | 15 | 27178 | 27197 | 542 |
| 546240 | 917 | 936 | GTAAAGTTCTTTTGCAGGTT | 5-10-5 | 23 | 27181 | 27200 | 543 |
| 546241 | 920 | 939 | CAGGTAAAGTTCTTTTGCAG | 5-10-5 | 69 | 27184 | 27203 | 544 |
| 547396 | 921 | 940 | TCAGGTAAAGTTCTTTTGCA | 5-10-5 | 49 | n/a | n/a | 545 |
| 547397 | 923 | 942 | GTTCAGGTAAAGTTCTTTTG | 5-10-5 | 27 | n/a | n/a | 546 |
| 546242 | 925 | 944 | GGGTTCAGGTAAAGTTCTTT | 5-10-5 | 8 | n/a | n/a | 547 |
| 547398 | 927 | 946 | CAGGGTTCAGGTAAAGTTCT | 5-10-5 | 16 | n/a | n/a | 548 |
| 547399 | 928 | 947 | GCAGGGTTCAGGTAAAGTTC | 5-10-5 | 10 | n/a | n/a | 549 |
| 547400 | 930 | 949 | TGGCAGGGTTCAGGTAAAGT | 5-10-5 | 0 | n/a | n/a | 550 |
| 547401 | 933 | 952 | GAATGGCAGGGTTCAGGTAA | 5-10-5 | 22 | n/a | n/a | 551 |
| 546243 | 934 | 953 | AGAATGGCAGGGTTCAGGTA | 5-10-5 | 16 | n/a | n/a | 552 |
| 547402 | 937 | 956 | TTTAGAATGGCAGGGTTCAG | 5-10-5 | 59 | n/a | n/a | 553 |
| 547403 | 939 | 958 | ATTTTAGAATGGCAGGGTTC | 5-10-5 | 10 | 27361 | 27380 | 554 |
| 546244 | 942 | 961 | TAAATTTTAGAATGGCAGGG | 5-10-5 | 27 | 27364 | 27383 | 555 |
| 547404 | 956 | 975 | AGTCAACTCCCGGGTAAATT | 5-10-5 | 64 | 27378 | 27397 | 556 |
| 547405 | 959 | 978 | CAAAGTCAACTCCCGGGTAA | 5-10-5 | 47 | 27381 | 27400 | 557 |
| 546247 | 960 | 979 | CCAAAGTCAACTCCCGGGTA | 5-10-5 | 90 | 27382 | 27401 | 558 |
| 546248 | 963 | 982 | CCTCCAAAGTCAACTCCCGG | 5-10-5 | 86 | 27385 | 27404 | 559 |
| 547406 | 965 | 984 | CTCCTCCAAAGTCAACTCCC | 5-10-5 | 81 | 27387 | 27406 | 560 |
| 546249 | 968 | 987 | CTTCTCCTCCAAAGTCAACT | 5-10-5 | 68 | 27390 | 27409 | 561 |
| 547407 | 975 | 994 | TTCAATTCTTCTCCTCCAAA | 5-10-5 | 59 | 27397 | 27416 | 562 |
| 546250 | 977 | 996 | CATTCAATTCTTCTCCTCCA | 5-10-5 | 65 | 27399 | 27418 | 563 |
| 547408 | 980 | 999 | TCACATTCAATTCTTCTCCT | 5-10-5 | 84 | 27402 | 27421 | 564 |
| 547409 | 982 | 1001 | AGTCACATTCAATTCTTCTC | 5-10-5 | 67 | 27404 | 27423 | 565 |
| 546251 | 1007 | 1026 | GGCAAACATTCACTCCTTTA | 5-10-5 | 92 | 27429 | 27448 | 566 |

TABLE 129

| | SEQ ID | SEQ ID | | | | SEQ ID | SEQ ID | |
|---|---|---|---|---|---|---|---|---|
| | NO: 1 | NO: 1 | | | | NO: 10 | NO: 10 | |
| ISIS | Start | Stop | | | % | Start | Stop | SEQ |
| NO | Site | Site | Sequence | Motif | inhibition | Site | Site | ID NO |
| 531231 | n/a | n/a | TATCACTGTACTAGTTTCCT | 5-10-5 | 95 | 14744 | 14763 | 344 |
| | | | | | | 14815 | 14834 | |
| | | | | | | 14886 | 14905 | |
| | | | | | | 14945 | 14964 | |
| | | | | | | 15005 | 15024 | |
| | | | | | | 15077 | 15096 | |
| | | | | | | 15220 | 15239 | |
| | | | | | | 15292 | 15311 | |
| | | | | | | 15351 | 15370 | |
| | | | | | | 15411 | 15430 | |
| | | | | | | 15483 | 15502 | |
| | | | | | | 15555 | 15574 | |
| | | | | | | 15613 | 15632 | |
| | | | | | | 15685 | 15704 | |
| | | | | | | 15815 | 15834 | |
| | | | | | | 15887 | 15906 | |
| | | | | | | 15945 | 15964 | |
| 546252 | 1011 | 1030 | TCTTGGCAAACATTCACTCC | 5-10-5 | 73 | 27433 | 27452 | 567 |
| 546253 | 1014 | 1033 | GTCTCTTGGCAAACATTCAC | 5-10-5 | 98 | 27436 | 27455 | 568 |
| 547410 | 1017 | 1036 | CAAGTCTCTTGGCAAACATT | 5-10-5 | 88 | 27439 | 27458 | 569 |
| 546254 | 1019 | 1038 | TGCAAGTCTCTTGGCAAACA | 5-10-5 | 95 | 27441 | 27460 | 570 |
| 546255 | 1024 | 1043 | CTTTGTGCAAGTCTCTTGGC | 5-10-5 | 92 | 27446 | 27465 | 571 |
| 547411 | 1027 | 1046 | CATCTTTGTGCAAGTCTCTT | 5-10-5 | 79 | 27449 | 27468 | 572 |
| 546256 | 1028 | 1047 | TCATCTTTGTGCAAGTCTCT | 5-10-5 | 83 | 27450 | 27469 | 573 |
| 547412 | 1029 | 1048 | ATCATCTTTGTGCAAGTCTC | 5-10-5 | 73 | 27451 | 27470 | 574 |
| 546258 | 1036 | 1055 | ACAGCGAATCATCTTTGTGC | 5-10-5 | 74 | 27458 | 27477 | 575 |
| 546259 | 1040 | 1059 | ACTGACAGCGAATCATCTTT | 5-10-5 | 86 | 27462 | 27481 | 576 |
| 546260 | 1045 | 1064 | GAAAAACTGACAGCGAATCA | 5-10-5 | 84 | 27467 | 27486 | 577 |
| 547413 | 1047 | 1066 | GTGAAAAACTGACAGCGAAT | 5-10-5 | 94 | 27469 | 27488 | 578 |
| 546263 | 1061 | 1080 | GGAGTAAAGAATAAGTGAAA | 5-10-5 | 0 | 27483 | 27502 | 579 |
| 547414 | 1063 | 1082 | TGGGAGTAAAGAATAAGTGA | 5-10-5 | 76 | 27485 | 27504 | 580 |
| 547415 | 1065 | 1084 | TCTGGGAGTAAAGAATAAGT | 5-10-5 | 71 | 27487 | 27506 | 581 |
| 546265 | 1069 | 1088 | GTCTTCTGGGAGTAAAGAAT | 5-10-5 | 65 | 27491 | 27510 | 582 |
| 546266 | 1072 | 1091 | ACAGTCTTCTGGGAGTAAAG | 5-10-5 | 63 | 27494 | 27513 | 583 |
| 547416 | 1075 | 1094 | CTTACAGTCTTCTGGGAGTA | 5-10-5 | 79 | 27497 | 27516 | 584 |
| 546267 | 1076 | 1095 | CCTTACAGTCTTCTGGGAGT | 5-10-5 | 72 | 27498 | 27517 | 585 |
| 547417 | 1077 | 1096 | TCCTTACAGTCTTCTGGGAG | 5-10-5 | 68 | 27499 | 27518 | 586 |
| 546268 | 1079 | 1098 | CTTCCTTACAGTCTTCTGGG | 5-10-5 | 93 | 27501 | 27520 | 587 |
| 547418 | 1092 | 1111 | CACTTACACTTCTCTTCCTT | 5-10-5 | 0 | n/a | n/a | 588 |
| 546270 | 1093 | 1112 | ACACTTACACTTCTCTTCCT | 5-10-5 | 32 | n/a | n/a | 589 |
| 546271 | 1097 | 1116 | AGAAACACTTACACTTCTCT | 5-10-5 | 60 | n/a | n/a | 590 |
| 547419 | 1101 | 1120 | CTTAAGAAACACTTACACTT | 5-10-5 | 51 | n/a | n/a | 591 |
| 547420 | 1112 | 1131 | CCATAGATAATCTTAAGAAA | 5-10-5 | 8 | 27633 | 27652 | 592 |
| 547421 | 1115 | 1134 | CATCCATAGATAATCTTAAG | 5-10-5 | 69 | 27636 | 27655 | 593 |
| 547422 | 1117 | 1136 | ACCATCCATAGATAATCTTA | 5-10-5 | 70 | 27638 | 27657 | 594 |
| 546275 | 1119 | 1138 | GAACCATCCATAGATAATCT | 5-10-5 | 87 | 27640 | 27659 | 595 |
| 546276 | 1123 | 1142 | TGGAGAACCATCCATAGATA | 5-10-5 | 74 | 27644 | 27663 | 596 |
| 546277 | 1146 | 1165 | TGTGTCCCATACGCAATCCT | 5-10-5 | 90 | 27667 | 27686 | 597 |
| 547423 | 1150 | 1169 | CCCTTGTGTCCCATACGCAA | 5-10-5 | 95 | 27671 | 27690 | 598 |
| 546279 | 1153 | 1172 | GCTCCCTTGTGTCCCATACG | 5-10-5 | 82 | 27674 | 27693 | 599 |
| 547424 | 1156 | 1175 | AGAGCTCCCTTGTGTCCCAT | 5-10-5 | 90 | 27677 | 27696 | 600 |
| 546280 | 1158 | 1177 | CCAGAGCTCCCTTGTGTCCC | 5-10-5 | 86 | 27679 | 27698 | 601 |
| 547425 | 1161 | 1180 | TAACCAGAGCTCCCTTGTGT | 5-10-5 | 85 | 27682 | 27701 | 602 |
| 546281 | 1162 | 1181 | GTAACCAGAGCTCCCTTGTG | 5-10-5 | 85 | 27683 | 27702 | 603 |
| 547426 | 1164 | 1183 | GAGTAACCAGAGCTCCCTTG | 5-10-5 | 92 | 27685 | 27704 | 604 |
| 547427 | 1166 | 1185 | AAGAGTAACCAGAGCTCCCT | 5-10-5 | 79 | 27687 | 27706 | 605 |
| 547428 | 1169 | 1188 | TCAAAGAGTAACCAGAGCTC | 5-10-5 | 78 | 27690 | 27709 | 606 |
| 546283 | 1171 | 1190 | TCTCAAAGAGTAACCAGAGC | 5-10-5 | 88 | 27692 | 27711 | 607 |
| 547429 | 1173 | 1192 | AATCTCAAAGAGTAACCAGA | 5-10-5 | 81 | 27694 | 27713 | 608 |
| 547430 | 1174 | 1193 | CAATCTCAAAGAGTAACCAG | 5-10-5 | 70 | 27695 | 27714 | 609 |
| 546284 | 1176 | 1195 | CACAATCTCAAAGAGTAACC | 5-10-5 | 89 | 27697 | 27716 | 610 |
| 546285 | 1180 | 1199 | GTTACACAATCTCAAAGAGT | 5-10-5 | 76 | 27701 | 27720 | 611 |
| 547431 | 1184 | 1203 | CAGTGTTACACAATCTCAAA | 5-10-5 | 67 | 27705 | 27724 | 612 |
| 547432 | 1186 | 1205 | CCCAGTGTTACACAATCTCA | 5-10-5 | 90 | 27707 | 27726 | 613 |
| 547433 | 1189 | 1208 | GTCCCCAGTGTTACACAATC | 5-10-5 | 63 | 27710 | 27729 | 614 |
| 546287 | 1192 | 1211 | GTTGTCCCCAGTGTTACACA | 5-10-5 | 82 | 27713 | 27732 | 615 |
| 546288 | 1240 | 1259 | GTTTGTTCCTCCAACAATGC | 5-10-5 | 78 | 27916 | 27935 | 616 |
| 547434 | 1243 | 1262 | AGAGTTTGTTCCTCCAACAA | 5-10-5 | 54 | 27919 | 27938 | 617 |
| 547435 | 1248 | 1267 | CAAGAAGAGTTTGTTCCTCC | 5-10-5 | 85 | 27924 | 27943 | 618 |
| 546290 | 1251 | 1270 | CCCCAAGAAGAGTTTGTTCC | 5-10-5 | 86 | 27927 | 27946 | 619 |
| 547436 | 1253 | 1272 | CTCCCCAAGAAGAGTTTGTT | 5-10-5 | 0 | 27929 | 27948 | 620 |
| 547437 | 1255 | 1274 | CTCTCCCCAAGAAGAGTTTG | 5-10-5 | 50 | 27931 | 27950 | 621 |
| 547438 | 1261 | 1280 | GGGCCACTCTCCCCAAGAAG | 5-10-5 | 82 | 27937 | 27956 | 622 |
| 546291 | 1263 | 1282 | CAGGGCCACTCTCCCCAAGA | 5-10-5 | 81 | 27939 | 27958 | 623 |
| 547439 | 1298 | 1317 | TCTGAGCTGTCAGCTTCACC | 5-10-5 | 85 | 27974 | 27993 | 624 |
| 546293 | 1301 | 1320 | GCCTCTGAGCTGTCAGCTTC | 5-10-5 | 64 | 27977 | 27996 | 625 |
| 547440 | 1327 | 1346 | TCCTATGAGTGACCCTCCAC | 5-10-5 | 67 | 28003 | 28022 | 626 |
| 546294 | 1328 | 1347 | GTCCTATGAGTGACCCTCCA | 5-10-5 | 72 | 28004 | 28023 | 627 |
| 547441 | 1331 | 1350 | GGTGTCCTATGAGTGACCCT | 5-10-5 | 62 | 28007 | 28026 | 628 |
| 547442 | 1332 | 1351 | TGGTGTCCTATGAGTGACCC | 5-10-5 | 42 | 28008 | 28027 | 629 |
| 547443 | 1336 | 1355 | CCACTGGTGTCCTATGAGTG | 5-10-5 | 70 | 28012 | 28031 | 630 |
| 546295 | 1337 | 1356 | CCCACTGGTGTCCTATGAGT | 5-10-5 | 67 | 28013 | 28032 | 631 |
| 546296 | 1370 | 1389 | GAAGCCCATCAAAGCAGTGG | 5-10-5 | 27 | n/a | n/a | 632 |
| 546297 | 1397 | 1416 | TATAGATGCGCCAAACATCC | 5-10-5 | 82 | 30475 | 30494 | 633 |
| 547444 | 1398 | 1417 | CTATAGATGCGCCAAACATC | 5-10-5 | 71 | 30476 | 30495 | 634 |
| 547445 | 1402 | 1421 | GCCACTATAGATGCGCCAAA | 5-10-5 | 97 | 30480 | 30499 | 635 |
| 546299 | 1404 | 1423 | ATGCCACTATAGATGCGCCA | 5-10-5 | 84 | 30482 | 30501 | 636 |
| 546300 | 1424 | 1443 | TAATGTCTGACAGATTTAAA | 5-10-5 | 58 | 30502 | 30521 | 637 |
| 546301 | 1427 | 1446 | TTGTAATGTCTGACAGATTT | 5-10-5 | 93 | 30505 | 30524 | 638 |
| 546302 | 1444 | 1463 | TGAGAAAGGTGTATCTTTTG | 5-10-5 | 87 | 30522 | 30541 | 639 |
| 547446 | 1447 | 1466 | TTGTGAGAAAGGTGTATCTT | 5-10-5 | 84 | 30525 | 30544 | 640 |
| 546303 | 1448 | 1467 | TTTGTGAGAAAGGTGTATCT | 5-10-5 | 77 | 30526 | 30545 | 641 |
| 547447 | 1449 | 1468 | ATTTGTGAGAAAGGTGTATC | 5-10-5 | 80 | 30527 | 30546 | 642 |

TABLE 130

| | SEQ | SEQ | | | | SEQ | SEQ | |
|---|---|---|---|---|---|---|---|---|
| | ID | ID | | | | ID | ID | |
| | NO: | NO: | | | | NO. | NO. | |
| | 1 | 1 | | | | 10 | 10 | SEQ |
| ISIS | Start | Stop | | | % | Start | Stop | ID |
| NO | Site | Site | Sequence | Motif | inhibition | Site | Site | NO: |
| 531231 | n/a | n/a | TATCACTGTACTAGTTTCCT | 5-10-5 | 96 | 14744 | 14763 | 334 |
| | | | | | | 14815 | 14834 | |
| | | | | | | 14886 | 14905 | |
| | | | | | | 14945 | 14964 | |
| | | | | | | 15005 | 15024 | |
| | | | | | | 15077 | 15096 | |
| | | | | | | 15220 | 15239 | |
| | | | | | | 15292 | 15311 | |
| | | | | | | 15351 | 15370 | |
| | | | | | | 15411 | 15430 | |
| | | | | | | 15483 | 15502 | |
| | | | | | | 15555 | 15574 | |
| | | | | | | 15613 | 15632 | |
| | | | | | | 15685 | 15704 | |
| | | | | | | 15815 | 15834 | |
| | | | | | | 15887 | 15906 | |
| | | | | | | 15945 | 15964 | |
| 547448 | 1451 | 1470 | TTATTTGTGAGAAAGGTGTA | 5-10-5 | 75 | 30529 | 30548 | 643 |
| 547449 | 1453 | 1472 | TTTTATTTGTGAGAAAGGTG | 5-10-5 | 71 | 30531 | 30550 | 644 |
| 546304 | 1454 | 1473 | CTTTTATTTGTGAGAAAGGT | 5-10-5 | 94 | 30532 | 30551 | 645 |
| 547450 | 1456 | 1475 | CTCTTTTATTTGTGAGAAAG | 5-10-5 | 71 | 30534 | 30553 | 646 |
| 547451 | 1471 | 1490 | TTGGTGAATAATAATCTCTT | 5-10-5 | 75 | 30549 | 30568 | 647 |
| 546306 | 1472 | 1491 | TTTGGTGAATAATAATCTCT | 5-10-5 | 65 | 30550 | 30569 | 648 |
| 547452 | 1474 | 1493 | GTTTTGGTGAATAATAATCT | 5-10-5 | 47 | 30552 | 30571 | 649 |
| 546307 | 1478 | 1497 | TATAGTTTTGGTGAATAATA | 5-10-5 | 12 | 30556 | 30575 | 650 |
| 546308 | 1482 | 1501 | ACTTTATAGTTTTGGTGAAT | 5-10-5 | 57 | 30560 | 30579 | 651 |
| 546309 | 1492 | 1511 | CCCTTCTGAGACTTTATAGT | 5-10-5 | 88 | 30570 | 30589 | 652 |
| 546310 | 1496 | 1515 | GATTCCCTTCTGAGACTTTA | 5-10-5 | 78 | 30574 | 30593 | 653 |
| 546311 | 1499 | 1518 | CATGATTCCCTTCTGAGACT | 5-10-5 | 79 | 30577 | 30596 | 654 |
| 547453 | 1500 | 1519 | TCATGATTCCCTTCTGAGAC | 5-10-5 | 81 | 30578 | 30597 | 655 |
| 547454 | 1502 | 1521 | TATCATGATTCCCTTCTGAG | 5-10-5 | 92 | 30580 | 30599 | 656 |
| 547455 | 1503 | 1522 | ATATCATGATTCCCTTCTGA | 5-10-5 | 88 | 30581 | 30600 | 657 |
| 547456 | 1506 | 1525 | GCGATATCATGATTCCCTTC | 5-10-5 | 89 | 30584 | 30603 | 658 |
| 546313 | 1507 | 1526 | GGCGATATCATGATTCCCTT | 5-10-5 | 60 | 30585 | 30604 | 659 |
| 547457 | 1509 | 1528 | AAGGCGATATCATGATTCCC | 5-10-5 | 89 | 30587 | 30606 | 660 |
| 547458 | 1513 | 1532 | TATCAAGGCGATATCATGAT | 5-10-5 | 84 | 30591 | 30610 | 661 |
| 547459 | 1519 | 1538 | GAGTTTTATCAAGGCGATAT | 5-10-5 | 28 | 30597 | 30616 | 662 |
| 547460 | 1522 | 1541 | CTGGAGTTTTATCAAGGCGA | 5-10-5 | 72 | 30600 | 30619 | 663 |
| 546316 | 1524 | 1543 | GCCTGGAGTTTTATCAAGGC | 5-10-5 | 51 | 30602 | 30621 | 664 |
| 546317 | 1528 | 1547 | AGGAGCCTGGAGTTTTATCA | 5-10-5 | 12 | 30606 | 30625 | 665 |
| 546318 | 1534 | 1553 | ATTCAAAGGAGCCTGGAGTT | 5-10-5 | 47 | 30612 | 30631 | 666 |
| 547461 | 1537 | 1556 | GTAATTCAAAGGAGCCTGGA | 5-10-5 | 49 | 30615 | 30634 | 667 |
| 547462 | 1539 | 1558 | GTGTAATTCAAAGGAGCCTG | 5-10-5 | 59 | 30617 | 30636 | 668 |
| 546319 | 1541 | 1560 | CAGTGTAATTCAAAGGAGCC | 5-10-5 | 50 | 30619 | 30638 | 669 |
| 547463 | 1564 | 1583 | TAGGCATATTGGTTTTTGGA | 5-10-5 | 74 | 31870 | 31889 | 670 |
| 546320 | 1566 | 1585 | GGTAGGCATATTGGTTTTTG | 5-10-5 | 72 | 31872 | 31891 | 671 |
| 546321 | 1569 | 1588 | GAAGGTAGGCATATTGGTTT | 5-10-5 | 53 | 31875 | 31894 | 672 |
| 546322 | 1584 | 1603 | CTTGTGTCACCTTTGGAAGG | 5-10-5 | 74 | 31890 | 31909 | 673 |
| 547464 | 1585 | 1604 | GCTTGTGTCACCTTTGGAAG | 5-10-5 | 95 | 31891 | 31910 | 674 |
| 546323 | 1587 | 1606 | GTGCTTGTGTCACCTTTGGA | 5-10-5 | 94 | 31893 | 31912 | 675 |
| 547465 | 1592 | 1611 | AAATTGTGCTTGTGTCACCT | 5-10-5 | 88 | 31898 | 31917 | 676 |
| 547466 | 1596 | 1615 | GTATAAATTGTGCTTGTGTC | 5-10-5 | 82 | 31902 | 31921 | 677 |
| 546324 | 1597 | 1616 | GGTATAAATTGTGCTTGTGT | 5-10-5 | 73 | 31903 | 31922 | 678 |
| 547467 | 1598 | 1617 | TGGTATAAATTGTGCTTGTG | 5-10-5 | 80 | 31904 | 31923 | 679 |
| 547468 | 1600 | 1619 | GTTGGTATAAATTGTGCTTG | 5-10-5 | 61 | 31906 | 31925 | 680 |
| 546325 | 1602 | 1621 | CAGTTGGTATAAATTGTGCT | 5-10-5 | 74 | 31908 | 31927 | 681 |
| 546326 | 1607 | 1626 | CCCAACAGTTGGTATAAATT | 5-10-5 | 62 | 31913 | 31932 | 682 |
| 547469 | 1610 | 1629 | TTACCCAACAGTTGGTATAA | 5-10-5 | 67 | 31916 | 31935 | 683 |
| 546327 | 1612 | 1631 | GGTTACCCAACAGTTGGTAT | 5-10-5 | 95 | 31918 | 31937 | 684 |
| 546328 | 1624 | 1643 | GAAGCCCCATCCGGTTACCC | 5-10-5 | 84 | 31930 | 31949 | 685 |
| 547470 | 1628 | 1647 | TCGAGAAGCCCCATCCGGTT | 5-10-5 | 70 | 31934 | 31953 | 686 |
| 546329 | 1631 | 1650 | CCTTCGAGAAGCCCCATCCG | 5-10-5 | 18 | 31937 | 31956 | 687 |
| 546330 | 1636 | 1655 | TTTCTCCTTCGAGAAGCCCC | 5-10-5 | 55 | 31942 | 31961 | 688 |
| 547471 | 1638 | 1657 | CCTTTCTCCTTCGAGAAGCC | 5-10-5 | 58 | 31944 | 31963 | 689 |
| 547472 | 1641 | 1660 | TCACCTTTCTCCTTCGAGAA | 5-10-5 | 44 | n/a | n/a | 690 |
| 546331 | 1642 | 1661 | TTCACCTTTCTCCTTCGAGA | 5-10-5 | 59 | n/a | n/a | 691 |
| 547473 | 1649 | 1668 | TTTGGATTTCACCTTTCTCC | 5-10-5 | 5 | n/a | n/a | 692 |
| 547474 | 1659 | 1678 | TGTAGAATATTTTGGATTTC | 5-10-5 | 51 | 33103 | 33122 | 693 |
| 547475 | 1686 | 1705 | TTTGTTACCAAAGGAATATT | 5-10-5 | 44 | 33130 | 33149 | 694 |
| 547476 | 1688 | 1707 | CATTTGTTACCAAAGGAATA | 5-10-5 | 75 | 33132 | 33151 | 695 |
| 546336 | 1689 | 1708 | TCATTTGTTACCAAAGGAAT | 5-10-5 | 66 | 33133 | 33152 | 696 |
| 547477 | 1692 | 1711 | TCTTCATTTGTTACCAAAGG | 5-10-5 | 74 | 33136 | 33155 | 697 |
| 547478 | 1695 | 1714 | CATTCTTCATTTGTTACCAA | 5-10-5 | 85 | 33139 | 33158 | 698 |
| 546339 | 1712 | 1731 | CTTGATATCTTTTCTGGCAT | 5-10-5 | 65 | 33156 | 33175 | 699 |
| 546340 | 1716 | 1735 | TAATCTTGATATCTTTTCTG | 5-10-5 | 30 | 33160 | 33179 | 700 |
| 547479 | 1718 | 1737 | TATAATCTTGATATCTTTTC | 5-10-5 | 48 | 33162 | 33181 | 701 |
| 547480 | 1756 | 1775 | TTCTTTATAGCCAGCACAGA | 5-10-5 | 60 | 33200 | 33219 | 702 |
| 547481 | 1758 | 1777 | CCTTCTTTATAGCCAGCACA | 5-10-5 | 71 | 33202 | 33221 | 703 |
| 547482 | 1760 | 1779 | CCCCTTCTTTATAGCCAGCA | 5-10-5 | 90 | 33204 | 33223 | 704 |
| 546343 | 1761 | 1780 | CCCCCTTCTTTATAGCCAGC | 5-10-5 | 97 | 33205 | 33224 | 705 |
| 547483 | 1762 | 1781 | TCCCCCTTCTTTATAGCCAG | 5-10-5 | 71 | 33206 | 33225 | 706 |
| 546345 | 1773 | 1792 | CAAGCATCTTTTCCCCCTTC | 5-10-5 | 86 | 33217 | 33236 | 707 |
| 546346 | 1796 | 1815 | AGGGACCACCTGAATCTCCC | 5-10-5 | 83 | 33895 | 33914 | 708 |
| 547484 | 1799 | 1818 | CTAAGGGACCACCTGAATCT | 5-10-5 | 69 | 33898 | 33917 | 709 |
| 546347 | 1800 | 1819 | ACTAAGGGACCACCTGAATC | 5-10-5 | 28 | 33899 | 33918 | 710 |
| 547485 | 1803 | 1822 | CAAACTAAGGGACCACCTGA | 5-10-5 | 49 | 33902 | 33921 | 711 |
| 546348 | 1804 | 1823 | GCAAACTAAGGGACCACCTG | 5-10-5 | 79 | 33903 | 33922 | 712 |
| 547486 | 1805 | 1824 | TGCAAACTAAGGGACCACCT | 5-10-5 | 89 | 33904 | 33923 | 713 |
| 546349 | 1810 | 1829 | GTGTTTGCAAACTAAGGGAC | 5-10-5 | 48 | 33909 | 33928 | 714 |
| 547487 | 1811 | 1830 | TGTGTTTGCAAACTAAGGGA | 5-10-5 | 72 | 33910 | 33929 | 715 |
| 546350 | 1868 | 1887 | CCCTGCGGGCACAGCCTTCA | 5-10-5 | 88 | 33967 | 33986 | 716 |
| 546351 | 1873 | 1892 | TTGCTCCCTGCGGGCACAGC | 5-10-5 | 82 | 33972 | 33991 | 717 |
| 546352 | 1880 | 1899 | CACCAGGTTGCTCCCTGCGG | 5-10-5 | 75 | 33979 | 33998 | 718 |
| 547488 | 1881 | 1900 | ACACCAGGTTGCTCCCTGCG | 5-10-5 | 71 | 33980 | 33999 | 719 |

TABLE 131

| | SEQ | SEQ | | | | SEQ | SEQ | |
|---|---|---|---|---|---|---|---|---|
| | ID | ID | | | | ID | ID | |
| | NO: | NO: | | | | NO. | NO. | |
| | 1 | 1 | | | | 10 | 10 | SEQ |
| ISIS | Start | Stop | | | % | Start | Stop | ID |
| NO | Site | Site | Sequence | Motif | inhibition | Site | Site | NO: |
| 531231 | n/a | n/a | TATCACTGTACTAGTTTCCT | 5-10-5 | 72 | 14744 | 14763 | 334 |
| | | | | | | 14815 | 14834 | |
| | | | | | | 14886 | 14905 | |
| | | | | | | 14945 | 14964 | |
| | | | | | | 15005 | 15024 | |
| | | | | | | 15077 | 15096 | |
| | | | | | | 15220 | 15239 | |
| | | | | | | 15292 | 15311 | |
| | | | | | | 15351 | 15370 | |
| | | | | | | 15411 | 15430 | |
| | | | | | | 15483 | 15502 | |
| | | | | | | 15555 | 15574 | |
| | | | | | | 15613 | 15632 | |
| | | | | | | 15685 | 15704 | |
| | | | | | | 15815 | 15834 | |
| | | | | | | 15887 | 15906 | |
| | | | | | | 15945 | 15964 | |
| 547448 | 1451 | 1470 | TTATTTGTGAGAAAGGTGTA | 5-10-5 | 83 | 30529 | 30548 | 643 |
| 547449 | 1453 | 1472 | TTTTATTTGTGAGAAAGGTG | 5-10-5 | 73 | 30531 | 30550 | 644 |
| 546304 | 1454 | 1473 | CTTTTATTTGTGAGAAAGGT | 5-10-5 | 86 | 30532 | 30551 | 645 |
| 547450 | 1456 | 1475 | CTCTTTTATTTGTGAGAAAG | 5-10-5 | 67 | 30534 | 30553 | 646 |
| 547451 | 1471 | 1490 | TTGGTGAATAATAATCTCTT | 5-10-5 | 64 | 30549 | 30568 | 647 |
| 546306 | 1472 | 1491 | TTTGGTGAATAATAATCTCT | 5-10-5 | 71 | 30550 | 30569 | 648 |
| 547452 | 1474 | 1493 | GTTTTGGTGAATAATAATCT | 5-10-5 | 62 | 30552 | 30571 | 649 |
| 546307 | 1478 | 1497 | TATAGTTTTGGTGAATAATA | 5-10-5 | 0 | 30556 | 30575 | 650 |
| 546308 | 1482 | 1501 | ACTTTATAGTTTTGGTGAAT | 5-10-5 | 43 | 30560 | 30579 | 651 |
| 546309 | 1492 | 1511 | CCCTTCTGAGACTTTATAGT | 5-10-5 | 81 | 30570 | 30589 | 652 |
| 546310 | 1496 | 1515 | GATTCCCTTCTGAGACTTTA | 5-10-5 | 67 | 30574 | 30593 | 653 |
| 546311 | 1499 | 1518 | CATGATTCCCTTCTGAGACT | 5-10-5 | 76 | 30577 | 30596 | 654 |
| 547453 | 1500 | 1519 | TCATGATTCCCTTCTGAGAC | 5-10-5 | 81 | 30578 | 30597 | 655 |
| 547454 | 1502 | 1521 | TATCATGATTCCCTTCTGAG | 5-10-5 | 78 | 30580 | 30599 | 656 |
| 547455 | 1503 | 1522 | ATATCATGATTCCCTTCTGA | 5-10-5 | 66 | 30581 | 30600 | 657 |
| 547456 | 1506 | 1525 | GCGATATCATGATTCCCTTC | 5-10-5 | 96 | 30584 | 30603 | 658 |
| 546313 | 1507 | 1526 | GGCGATATCATGATTCCCTT | 5-10-5 | 75 | 30585 | 30604 | 659 |
| 547457 | 1509 | 1528 | AAGGCGATATCATGATTCCC | 5-10-5 | 92 | 30587 | 30606 | 660 |
| 547458 | 1513 | 1532 | TATCAAGGCGATATCATGAT | 5-10-5 | 64 | 30591 | 30610 | 661 |
| 547459 | 1519 | 1538 | GAGTTTTATCAAGGCGATAT | 5-10-5 | 51 | 30597 | 30616 | 662 |
| 547460 | 1522 | 1541 | CTGGAGTTTTATCAAGGCGA | 5-10-5 | 75 | 30600 | 30619 | 663 |
| 546316 | 1524 | 1543 | GCCTGGAGTTTTATCAAGGC | 5-10-5 | 60 | 30602 | 30621 | 664 |
| 546317 | 1528 | 1547 | AGGAGCCTGGAGTTTTATCA | 5-10-5 | 31 | 30606 | 30625 | 665 |
| 546318 | 1534 | 1553 | ATTCAAAGGAGCCTGGAGTT | 5-10-5 | 46 | 30612 | 30631 | 666 |
| 547461 | 1537 | 1556 | GTAATTCAAAGGAGCCTGGA | 5-10-5 | 55 | 30615 | 30634 | 667 |
| 547462 | 1539 | 1558 | GTGTAATTCAAAGGAGCCTG | 5-10-5 | 54 | 30617 | 30636 | 668 |
| 546319 | 1541 | 1560 | CAGTGTAATTCAAAGGAGCC | 5-10-5 | 61 | 30619 | 30638 | 669 |
| 547463 | 1564 | 1583 | TAGGCATATTGGTTTTTGGA | 5-10-5 | 84 | 31870 | 31889 | 670 |
| 546320 | 1566 | 1585 | GGTAGGCATATTGGTTTTTG | 5-10-5 | 69 | 31872 | 31891 | 671 |
| 546321 | 1569 | 1588 | GAAGGTAGGCATATTGGTTT | 5-10-5 | 56 | 31875 | 31894 | 672 |
| 546322 | 1584 | 1603 | CTTGTGTCACCTTTGGAAGG | 5-10-5 | 68 | 31890 | 31909 | 673 |
| 547464 | 1585 | 1604 | GCTTGTGTCACCTTTGGAAG | 5-10-5 | 84 | 31891 | 31910 | 674 |
| 546323 | 1587 | 1606 | GTGCTTGTGTCACCTTTGGA | 5-10-5 | 80 | 31893 | 31912 | 675 |
| 547465 | 1592 | 1611 | AAATTGTGCTTGTGTCACCT | 5-10-5 | 85 | 31898 | 31917 | 676 |
| 547466 | 1596 | 1615 | GTATAAATTGTGCTTGTGTC | 5-10-5 | 43 | 31902 | 31921 | 677 |
| 546324 | 1597 | 1616 | GGTATAAATTGTGCTTGTGT | 5-10-5 | 82 | 31903 | 31922 | 678 |
| 547467 | 1598 | 1617 | TGGTATAAATTGTGCTTGTG | 5-10-5 | 65 | 31904 | 31923 | 679 |
| 547468 | 1600 | 1619 | GTTGGTATAAATTGTGCTTG | 5-10-5 | 46 | 31906 | 31925 | 680 |
| 546325 | 1602 | 1621 | CAGTTGGTATAAATTGTGCT | 5-10-5 | 79 | 31908 | 31927 | 681 |
| 546326 | 1607 | 1626 | CCCAACAGTTGGTATAAATT | 5-10-5 | 64 | 31913 | 31932 | 682 |
| 547469 | 1610 | 1629 | TTACCCAACAGTTGGTATAA | 5-10-5 | 50 | 31916 | 31935 | 683 |
| 546327 | 1612 | 1631 | GGTTACCCAACAGTTGGTAT | 5-10-5 | 84 | 31918 | 31937 | 684 |
| 546328 | 1624 | 1643 | GAAGCCCCATCCGGTTACCC | 5-10-5 | 81 | 31930 | 31949 | 685 |
| 547470 | 1628 | 1647 | TCGAGAAGCCCCATCCGGTT | 5-10-5 | 68 | 31934 | 31953 | 686 |
| 546329 | 1631 | 1650 | CCTTCGAGAAGCCCCATCCG | 5-10-5 | 8 | 31937 | 31956 | 687 |
| 546330 | 1636 | 1655 | TTTCTCCTTCGAGAAGCCCC | 5-10-5 | 67 | 31942 | 31961 | 688 |
| 547471 | 1638 | 1657 | CCTTTCTCCTTCGAGAAGCC | 5-10-5 | 43 | 31944 | 31963 | 689 |
| 547472 | 1641 | 1660 | TCACCTTTCTCCTTCGAGAA | 5-10-5 | 42 | n/a | n/a | 690 |
| 546331 | 1642 | 1661 | TTCACCTTTCTCCTTCGAGA | 5-10-5 | 44 | n/a | n/a | 691 |
| 547473 | 1649 | 1668 | TTTGGATTTCACCTTTCTCC | 5-10-5 | 26 | n/a | n/a | 692 |
| 547474 | 1659 | 1678 | TGTAGAATATTTTGGATTTC | 5-10-5 | 34 | 33103 | 33122 | 693 |
| 547475 | 1686 | 1705 | TTTGTTACCAAAGGAATATT | 5-10-5 | 42 | 33130 | 33149 | 694 |
| 547476 | 1688 | 1707 | CATTTGTTACCAAAGGAATA | 5-10-5 | 71 | 33132 | 33151 | 695 |
| 546336 | 1689 | 1708 | TCATTTGTTACCAAAGGAAT | 5-10-5 | 73 | 33133 | 33152 | 696 |
| 547477 | 1692 | 1711 | TCTTCATTTGTTACCAAAGG | 5-10-5 | 68 | 33136 | 33155 | 697 |
| 547478 | 1695 | 1714 | CATTCTTCATTTGTTACCAA | 5-10-5 | 55 | 33139 | 33158 | 698 |
| 546339 | 1712 | 1731 | CTTGATATCTTTTCTGGCAT | 5-10-5 | 64 | 33156 | 33175 | 699 |
| 546340 | 1716 | 1735 | TAATCTTGATATCTTTTCTG | 5-10-5 | 56 | 33160 | 33179 | 700 |
| 547479 | 1718 | 1737 | TATAATCTTGATATCTTTTC | 5-10-5 | 9 | 33162 | 33181 | 701 |
| 547480 | 1756 | 1775 | TTCTTTATAGCCAGCACAGA | 5-10-5 | 49 | 33200 | 33219 | 702 |
| 547481 | 1758 | 1777 | CCTTCTTTATAGCCAGCACA | 5-10-5 | 77 | 33202 | 33221 | 703 |
| 547482 | 1760 | 1779 | CCCCTTCTTTATAGCCAGCA | 5-10-5 | 65 | 33204 | 33223 | 704 |
| 546343 | 1761 | 1780 | CCCCCTTCTTTATAGCCAGC | 5-10-5 | 91 | 33205 | 33224 | 705 |
| 547483 | 1762 | 1781 | TCCCCCTTCTTTATAGCCAG | 5-10-5 | 77 | 33206 | 33225 | 706 |
| 546345 | 1773 | 1792 | CAAGCATCTTTTCCCCCTTC | 5-10-5 | 80 | 33217 | 33236 | 707 |
| 546346 | 1796 | 1815 | AGGGACCACCTGAATCTCCC | 5-10-5 | 70 | 33895 | 33914 | 708 |
| 547484 | 1799 | 1818 | CTAAGGGACCACCTGAATCT | 5-10-5 | 64 | 33898 | 33917 | 709 |
| 546347 | 1800 | 1819 | ACTAAGGGACCACCTGAATC | 5-10-5 | 22 | 33899 | 33918 | 710 |
| 547485 | 1803 | 1822 | CAAACTAAGGGACCACCTGA | 5-10-5 | 66 | 33902 | 33921 | 711 |
| 546348 | 1804 | 1823 | GCAAACTAAGGGACCACCTG | 5-10-5 | 76 | 33903 | 33922 | 712 |
| 547486 | 1805 | 1824 | TGCAAACTAAGGGACCACCT | 5-10-5 | 78 | 33904 | 33923 | 713 |
| 546349 | 1810 | 1829 | GTGTTTGCAAACTAAGGGAC | 5-10-5 | 35 | 33909 | 33928 | 714 |
| 547487 | 1811 | 1830 | TGTGTTTGCAAACTAAGGGA | 5-10-5 | 61 | 33910 | 33929 | 715 |
| 546350 | 1868 | 1887 | CCCTGCGGGCACAGCCTTCA | 5-10-5 | 74 | 33967 | 33986 | 716 |
| 546351 | 1873 | 1892 | TTGCTCCCTGCGGGCACAGC | 5-10-5 | 60 | 33972 | 33991 | 717 |
| 546352 | 1880 | 1899 | CACCAGGTTGCTCCCTGCGG | 5-10-5 | 74 | 33979 | 33998 | 718 |
| 547488 | 1881 | 1900 | ACACCAGGTTGCTCCCTGCG | 5-10-5 | 72 | 33980 | 33999 | 719 |

TABLE 132

| | SEQ | SEQ | | | | SEQ | SEQ | |
|---|---|---|---|---|---|---|---|---|
| | ID | ID | | | | ID | ID | |
| | NO: | NO: | | | | NO. | NO. | |
| | 1 | 1 | | | | 10 | 10 | SEQ |
| ISIS | Start | Stop | | | % | Start | Stop | ID |
| NO | Site | Site | Sequence | Motif | inhibition | Site | Site | NO: |
| 531231 | n/a | n/a | TATCACTGTACTAGTTTCCT | 5-10-5 | 90 | 14744 | 14763 | 334 |
| | | | | | | 14815 | 14834 | |
| | | | | | | 14886 | 14905 | |
| | | | | | | 14945 | 14964 | |
| | | | | | | 15005 | 15024 | |
| | | | | | | 15077 | 15096 | |
| | | | | | | 15220 | 15239 | |
| | | | | | | 15292 | 15311 | |
| | | | | | | 15351 | 15370 | |
| | | | | | | 15411 | 15430 | |
| | | | | | | 15483 | 15502 | |
| | | | | | | 15555 | 15574 | |
| | | | | | | 15613 | 15632 | |
| | | | | | | 15685 | 15704 | |
| | | | | | | 15815 | 15834 | |
| | | | | | | 15887 | 15906 | |
| | | | | | | 15945 | 15964 | |
| 547489 | 1883 | 1902 | AGACACCAGGTTGCTCCCTG | 5-10-5 | 34 | 33982 | 34001 | 720 |
| 547490 | 1885 | 1904 | GTAGACACCAGGTTGCTCCC | 5-10-5 | 55 | 33984 | 34003 | 721 |
| 546353 | 1900 | 1919 | CTCAGCGACTTTGGTGTAGA | 5-10-5 | 55 | 33999 | 34018 | 722 |
| 546354 | 1903 | 1922 | GTACTCAGCGACTTTGGTGT | 5-10-5 | 47 | 34002 | 34021 | 723 |
| 547491 | 1906 | 1925 | CATGTACTCAGCGACTTTGG | 5-10-5 | 47 | 34005 | 34024 | 724 |
| 547492 | 1911 | 1930 | CAGTCCATGTACTCAGCGAC | 5-10-5 | 62 | 34010 | 34029 | 725 |
| 546356 | 1913 | 1932 | TCCAGTCCATGTACTCAGCG | 5-10-5 | 60 | 34012 | 34031 | 726 |
| 546357 | 1947 | 1966 | GCTTTTCCATCACTGCTCTG | 5-10-5 | 79 | 34046 | 34065 | 727 |
| 546358 | 1951 | 1970 | CTGAGCTTTTCCATCACTGC | 5-10-5 | 83 | 34050 | 34069 | 728 |
| 547493 | 1952 | 1971 | TCTGAGCTTTTCCATCACTG | 5-10-5 | 72 | 34051 | 34070 | 729 |
| 546359 | 1955 | 1974 | GCATCTGAGCTTTTCCATCA | 5-10-5 | 79 | 34054 | 34073 | 730 |
| 546360 | 1958 | 1977 | ACTGCATCTGAGCTTTTCCA | 5-10-5 | 13 | 34057 | 34076 | 731 |
| 547494 | 1963 | 1982 | TGGTGACTGCATCTGAGCTT | 5-10-5 | 70 | 34062 | 34081 | 732 |
| 547495 | 1965 | 1984 | GCTGGTGACTGCATCTGAGC | 5-10-5 | 61 | 34064 | 34083 | 733 |
| 547496 | 1967 | 1986 | ATGCTGGTGACTGCATCTGA | 5-10-5 | 80 | 34066 | 34085 | 734 |
| 546362 | 1969 | 1988 | TCATGCTGGTGACTGCATCT | 5-10-5 | 71 | 34068 | 34087 | 735 |
| 546363 | 1973 | 1992 | CTTCTCATGCTGGTGACTGC | 5-10-5 | 81 | 34072 | 34091 | 736 |
| 547497 | 1977 | 1996 | ACTGCTTCTCATGCTGGTGA | 5-10-5 | 68 | 34076 | 34095 | 737 |
| 546364 | 1979 | 1998 | GGACTGCTTCTCATGCTGGT | 5-10-5 | 61 | 34078 | 34097 | 738 |
| 547498 | 1981 | 2000 | CTGGACTGCTTCTCATGCTG | 5-10-5 | 44 | 34080 | 34099 | 739 |
| 547499 | 1983 | 2002 | CTCTGGACTGCTTCTCATGC | 5-10-5 | 65 | 34082 | 34101 | 740 |
| 546365 | 1986 | 2005 | AGACTCTGGACTGCTTCTCA | 5-10-5 | 64 | 34085 | 34104 | 741 |
| 547500 | 1989 | 2008 | CCTAGACTCTGGACTGCTTC | 5-10-5 | 65 | 34088 | 34107 | 742 |
| 546366 | 1991 | 2010 | TGCCTAGACTCTGGACTGCT | 5-10-5 | 79 | 34090 | 34109 | 743 |
| 547501 | 1993 | 2012 | ATTGCCTAGACTCTGGACTG | 5-10-5 | 55 | 34092 | 34111 | 744 |
| 546367 | 1997 | 2016 | AAAAATTGCCTAGACTCTGG | 5-10-5 | 61 | 34096 | 34115 | 745 |
| 546368 | 2003 | 2022 | GGTTGTAAAAATTGCCTAGA | 5-10-5 | 44 | 34102 | 34121 | 746 |
| 547502 | 2006 | 2025 | TCAGGTTGTAAAAATTGCCT | 5-10-5 | 64 | 34105 | 34124 | 747 |
| 546369 | 2007 | 2026 | CTCAGGTTGTAAAAATTGCC | 5-10-5 | 51 | 34106 | 34125 | 748 |
| 547503 | 2008 | 2027 | ACTCAGGTTGTAAAAATTGC | 5-10-5 | 66 | 34107 | 34126 | 749 |
| 547504 | 2010 | 2029 | GAACTCAGGTTGTAAAAATT | 5-10-5 | 37 | 34109 | 34128 | 750 |
| 546370 | 2014 | 2033 | ACTTGAACTCAGGTTGTAAA | 5-10-5 | 34 | 34113 | 34132 | 751 |
| 547505 | 2015 | 2034 | GACTTGAACTCAGGTTGTAA | 5-10-5 | 69 | 34114 | 34133 | 752 |
| 546372 | 2021 | 2040 | GAATTTGACTTGAACTCAGG | 5-10-5 | 49 | 34120 | 34139 | 753 |
| 546373 | 2025 | 2044 | CTCAGAATTTGACTTGAACT | 5-10-5 | 59 | 34124 | 34143 | 754 |
| 547506 | 2028 | 2047 | AGGCTCAGAATTTGACTTGA | 5-10-5 | 78 | 34127 | 34146 | 755 |
| 547507 | 2029 | 2048 | CAGGCTCAGAATTTGACTTG | 5-10-5 | 56 | 34128 | 34147 | 756 |
| 546374 | 2030 | 2049 | CCAGGCTCAGAATTTGACTT | 5-10-5 | 50 | 34129 | 34148 | 757 |
| 547508 | 2032 | 2051 | CCCCAGGCTCAGAATTTGAC | 5-10-5 | 69 | 34131 | 34150 | 758 |
| 547509 | 2034 | 2053 | CCCCCCAGGCTCAGAATTTG | 5-10-5 | 58 | 34133 | 34152 | 759 |
| 546375 | 2036 | 2055 | GACCCCCCAGGCTCAGAATT | 5-10-5 | 48 | 34135 | 34154 | 760 |
| 547510 | 2041 | 2060 | ATGAGGACCCCCCAGGCTCA | 5-10-5 | 40 | 34140 | 34159 | 761 |
| 547511 | 2042 | 2061 | GATGAGGACCCCCCAGGCTC | 5-10-5 | 53 | 34141 | 34160 | 762 |
| 547512 | 2045 | 2064 | GCAGATGAGGACCCCCCAGG | 5-10-5 | 74 | 34144 | 34163 | 763 |
| 547513 | 2046 | 2065 | TGCAGATGAGGACCCCCCAG | 5-10-5 | 72 | 34145 | 34164 | 764 |
| 546378 | 2048 | 2067 | TTTGCAGATGAGGACCCCCC | 5-10-5 | 79 | 34147 | 34166 | 765 |
| 546379 | 2056 | 2075 | CTCCATGCTTTGCAGATGAG | 5-10-5 | 69 | 34155 | 34174 | 766 |
| 546380 | 2062 | 2081 | GCCACTCTCCATGCTTTGCA | 5-10-5 | 81 | 34161 | 34180 | 767 |
| 547514 | 2066 | 2085 | AGATGCCACTCTCCATGCTT | 5-10-5 | 85 | 34165 | 34184 | 768 |
| 546381 | 2068 | 2087 | GAAGATGCCACTCTCCATGC | 5-10-5 | 73 | 34167 | 34186 | 769 |
| 547515 | 2069 | 2088 | AGAAGATGCCACTCTCCATG | 5-10-5 | 58 | 34168 | 34187 | 770 |
| 546382 | 2072 | 2091 | CAAAGAAGATGCCACTCTCC | 5-10-5 | 58 | 34171 | 34190 | 771 |
| 547516 | 2076 | 2095 | GATGCAAAGAAGATGCCACT | 5-10-5 | 48 | 34175 | 34194 | 772 |
| 546383 | 2077 | 2096 | GGATGCAAAGAAGATGCCAC | 5-10-5 | 57 | 34176 | 34195 | 773 |
| 547517 | 2079 | 2098 | TAGGATGCAAAGAAGATGCC | 5-10-5 | 57 | 34178 | 34197 | 774 |
| 547518 | 2083 | 2102 | TCCTTAGGATGCAAAGAAGA | 5-10-5 | 51 | 34182 | 34201 | 775 |
| 546384 | 2085 | 2104 | CGTCCTTAGGATGCAAAGAA | 5-10-5 | 81 | 34184 | 34203 | 776 |
| 546385 | 2120 | 2139 | ATTGTCCTCAGCAGCTCTGA | 5-10-5 | 67 | 34219 | 34238 | 777 |
| 547519 | 2126 | 2145 | CCAGACATTGTCCTCAGCAG | 5-10-5 | 76 | 34225 | 34244 | 778 |
| 546386 | 2128 | 2147 | AGCCAGACATTGTCCTCAGC | 5-10-5 | 78 | 34227 | 34246 | 779 |
| 547520 | 2130 | 2149 | TCAGCCAGACATTGTCCTCA | 5-10-5 | 76 | 34229 | 34248 | 780 |
| 547521 | 2132 | 2151 | CTTCAGCCAGACATTGTCCT | 5-10-5 | 58 | 34231 | 34250 | 781 |
| 546387 | 2138 | 2157 | AGCGGGCTTCAGCCAGACAT | 5-10-5 | 77 | 34237 | 34256 | 782 |
| 547522 | 2141 | 2160 | GAAAGCGGGCTTCAGCCAGA | 5-10-5 | 73 | 34240 | 34259 | 783 |
| 546388 | 2143 | 2162 | CTGAAAGCGGGCTTCAGCCA | 5-10-5 | 71 | 34242 | 34261 | 784 |
| 546389 | 2147 | 2166 | CGTGCTGAAAGCGGGCTTCA | 5-10-5 | 71 | 34246 | 34265 | 785 |
| 546390 | 2165 | 2184 | GTCAGCCCCTGGTTACGGCG | 5-10-5 | 70 | 34264 | 34283 | 786 |
| 547523 | 2167 | 2186 | TTGTCAGCCCCTGGTTACGG | 5-10-5 | 69 | 34266 | 34285 | 787 |
| 547524 | 2169 | 2188 | CATTGTCAGCCCCTGGTTAC | 5-10-5 | 58 | 34268 | 34287 | 788 |
| 546391 | 2170 | 2189 | GCATTGTCAGCCCCTGGTTA | 5-10-5 | 54 | 34269 | 34288 | 789 |
| 547525 | 2174 | 2193 | CCTCGCATTGTCAGCCCCTG | 5-10-5 | 78 | 34273 | 34292 | 790 |
| 546392 | 2176 | 2195 | GACCTCGCATTGTCAGCCCC | 5-10-5 | 72 | 34275 | 34294 | 791 |
| 547526 | 2178 | 2197 | GCGACCTCGCATTGTCAGCC | 5-10-5 | 59 | 34277 | 34296 | 792 |
| 547527 | 2185 | 2204 | CTCAGTTGCGACCTCGCATT | 5-10-5 | 58 | 34284 | 34303 | 793 |
| 546393 | 2186 | 2205 | TCTCAGTTGCGACCTCGCAT | 5-10-5 | 77 | 34285 | 34304 | 794 |
| 546394 | 2196 | 2215 | GTCATGGAGATCTCAGTTGC | 5-10-5 | 71 | 34295 | 34314 | 795 |
| 547528 | 2200 | 2219 | CACAGTCATGGAGATCTCAG | 5-10-5 | 78 | 34299 | 34318 | 796 |

TABLE 133

| | SEQ | SEQ | | | | SEQ | SEQ | |
|---|---|---|---|---|---|---|---|---|
| | ID | ID | | | | ID | ID | |
| | NO: | NO: | | | | NO. | NO. | |
| | 1 | 1 | | | | 10 | 10 | SEQ |
| ISIS | Start | Stop | | | % | Start | Stop | ID |
| NO | Site | Site | Sequence | Motif | inhibition | Site | Site | NO: |
| 531231 | n/a | n/a | TATCACTGTACTAGTTTCCT | 5-10-5 | 90 | 14744 | 14763 | 334 |
| | | | | | | 14815 | 14834 | |
| | | | | | | 14886 | 14905 | |
| | | | | | | 14945 | 14964 | |
| | | | | | | 15005 | 15024 | |
| | | | | | | 15077 | 15096 | |
| | | | | | | 15220 | 15239 | |
| | | | | | | 15292 | 15311 | |
| | | | | | | 15351 | 15370 | |
| | | | | | | 15411 | 15430 | |
| | | | | | | 15483 | 15502 | |
| | | | | | | 15555 | 15574 | |
| | | | | | | 15613 | 15632 | |
| | | | | | | 15685 | 15704 | |
| | | | | | | 15815 | 15834 | |
| | | | | | | 15887 | 15906 | |
| | | | | | | 15945 | 15964 | |
| 546403 | n/a | n/a | CCATGAACATCCTATCCGTG | 5-10-5 | 83 | 3282 | 3301 | 797 |
| 546406 | n/a | n/a | TGTCCTGTCAACATATTCCA | 5-10-5 | 80 | 3299 | 3318 | 798 |
| 546409 | n/a | n/a | GGGTTTCTGCCAACAGTTTC | 5-10-5 | 77 | 3326 | 3345 | 799 |
| 546410 | n/a | n/a | GACTTTGGGTTTCTGCCAAC | 5-10-5 | 83 | 3332 | 3351 | 800 |
| 546411 | n/a | n/a | ATATTGACTTTGGGTTTCTG | 5-10-5 | 56 | 3337 | 3356 | 801 |
| 546412 | n/a | n/a | GGCTTCAATATTGACTTTGG | 5-10-5 | 84 | 3344 | 3363 | 802 |
| 546416 | n/a | n/a | CTGCAGGCAATATTTTGCTT | 5-10-5 | 62 | 3364 | 3383 | 803 |
| 546418 | n/a | n/a | ATGTGGCACTGCAGGCAATA | 5-10-5 | 72 | 3372 | 3391 | 804 |
| 546419 | n/a | n/a | TTCTAATGTGGCACTGCAGG | 5-10-5 | 65 | 3377 | 3396 | 805 |
| 546421 | n/a | n/a | TCAAGCTGTTCTAATGTGGC | 5-10-5 | 71 | 3385 | 3404 | 806 |
| 546422 | n/a | n/a | ACGGTCTTCAAGCTGTTCTA | 5-10-5 | 72 | 3392 | 3411 | 807 |
| 546425 | n/a | n/a | GGTCAATCTGACTAGTGAAT | 5-10-5 | 69 | 2284 | 2303 | 808 |
| 546426 | n/a | n/a | TCTCTGGTCAATCTGACTAG | 5-10-5 | 49 | 2289 | 2308 | 809 |
| 546429 | n/a | n/a | GCCCACCAACAATCTCTGGT | 5-10-5 | 84 | 2301 | 2320 | 810 |
| 546432 | n/a | n/a | GACCCCAACAGACAGCCCAC | 5-10-5 | 62 | 2315 | 2334 | 811 |
| 546444 | n/a | n/a | CCAGAATCATGCCTTGTGGG | 5-10-5 | 61 | 4765 | 4784 | 812 |
| 546447 | n/a | n/a | GTCACCATAGACCCAGAATC | 5-10-5 | 68 | 4777 | 4796 | 813 |
| 546450 | n/a | n/a | GTGGCCCTCTTAAGTCACCA | 5-10-5 | 73 | 4790 | 4809 | 814 |
| 546453 | n/a | n/a | CTCATTGTTGTGTGGCCCTC | 5-10-5 | 82 | 4801 | 4820 | 815 |
| 546459 | n/a | n/a | GTAGCCATACATCTGAGGAA | 5-10-5 | 46 | 4830 | 4849 | 816 |
| 546461 | n/a | n/a | ATGTTTATTGTAGCCATACA | 5-10-5 | 53 | 4839 | 4858 | 817 |
| 546492 | n/a | n/a | CTCGCCTTTGTGACTCGATT | 5-10-5 | 61 | 26263 | 26282 | 818 |
| 546493 | n/a | n/a | CATACTCGCCTTTGTGACTC | 5-10-5 | 35 | 26267 | 26286 | 819 |
| 546494 | n/a | n/a | GCATACTCGCCTTTGTGACT | 5-10-5 | 67 | 26268 | 26287 | 820 |
| 546495 | n/a | n/a | TGCATACTCGCCTTTGTGAC | 5-10-5 | 65 | 26269 | 26288 | 821 |
| 546395 | 2209 | 2228 | TTCACAACACACAGTCATGG | 5-10-5 | 72 | 34308 | 34327 | 822 |
| 546397 | 2233 | 2252 | TTTTTTGATCTTTCACCATT | 5-10-5 | 55 | n/a | n/a | 823 |
| 546496 | n/a | n/a | ATGCATACTCGCCTTTGTGA | 5-10-5 | 54 | 26270 | 26289 | 824 |
| | | | | | | 26301 | 26320 | |
| 546497 | n/a | n/a | CATGCATACTCGCCTTTGTG | 5-10-5 | 56 | 26271 | 26290 | 825 |
| | | | | | | 26302 | 26321 | |
| 546498 | n/a | n/a | CCATGCATACTCGCCTTTGT | 5-10-5 | 65 | 26272 | 26291 | 826 |
| | | | | | | 26303 | 26322 | |
| 547529 | 2203 | 2222 | ACACACAGTCATGGAGATCT | 5-10-5 | 49 | 34302 | 34321 | 827 |
| 547530 | 2206 | 2225 | ACAACACACAGTCATGGAGA | 5-10-5 | 63 | 34305 | 34324 | 828 |
| 547531 | 2213 | 2232 | TTATTTCACAACACACAGTC | 5-10-5 | 69 | 34312 | 34331 | 829 |
| 546499 | n/a | n/a | TCCATGCATACTCGCCTTTG | 5-10-5 | 20 | 26273 | 26292 | 830 |
| 546500 | n/a | n/a | TTCCATGCATACTCGCCTTT | 5-10-5 | 46 | 26274 | 26293 | 831 |
| 546501 | n/a | n/a | TTTCCATGCATACTCGCCTT | 5-10-5 | 53 | 26275 | 26294 | 832 |
| 546502 | n/a | n/a | GATTTTCCATGCATACTCGC | 5-10-5 | 37 | 26278 | 26297 | 833 |
| 546503 | n/a | n/a | GTGATGCGATTTTCCATGCA | 5-10-5 | 53 | 26285 | 26304 | 834 |
| 546508 | n/a | n/a | GCAGCAAGTGCTCCCCATGC | 5-10-5 | 43 | 26317 | 26336 | 835 |
| 546511 | n/a | n/a | GTGATGAAAGTACAGCAGCA | 5-10-5 | 50 | 26331 | 26350 | 836 |
| 546683 | n/a | n/a | TCCTATCCGTGTTCAGCTGT | 5-10-5 | 69 | 3273 | 3292 | 837 |
| 546684 | n/a | n/a | TACTCTCTACATACTCAGGA | 5-10-5 | 71 | 3561 | 3580 | 838 |
| 546687 | n/a | n/a | TGAGACCTCCAGACTACTGT | 5-10-5 | 76 | 3847 | 3866 | 839 |
| 546690 | n/a | n/a | CTCTGCTGGTTTTAGACCAC | 5-10-5 | 44 | 4027 | 4046 | 840 |
| 546695 | n/a | n/a | GGGACAATCTCCACCCCCGA | 5-10-5 | 36 | 4225 | 4244 | 841 |
| 546698 | n/a | n/a | TGCAGAGTGTCATCTGCGAA | 5-10-5 | 59 | 4387 | 4406 | 842 |
| 546700 | n/a | n/a | TGGTTCCCTAGCGGTCCAGA | 5-10-5 | 78 | 4561 | 4580 | 843 |
| 546705 | n/a | n/a | CCCCTGTAGTTGGCTGTGGT | 5-10-5 | 66 | 5046 | 5065 | 844 |
| 546707 | n/a | n/a | GCAAGTCAAAGAGTGTCCAC | 5-10-5 | 73 | 5283 | 5302 | 845 |
| 546710 | n/a | n/a | GAAGCCTGTTAGAGTTGGCC | 5-10-5 | 73 | 5576 | 5595 | 846 |
| 546719 | n/a | n/a | CCCCCATGTCCATGGACTTT | 5-10-5 | 55 | 6329 | 6348 | 847 |
| 547532 | n/a | n/a | CTGCCAACAGTTTCAACTTT | 5-10-5 | 65 | 3320 | 3339 | 848 |
| 547533 | n/a | n/a | TTTTGCTTGGCTTCAATATT | 5-10-5 | 23 | 3352 | 3371 | 849 |
| 547534 | n/a | n/a | ATCTGACTAGTGAATGGCTT | 5-10-5 | 72 | 2279 | 2298 | 850 |
| 547535 | n/a | n/a | AGACAGCCCACCAACAATCT | 5-10-5 | 28 | 2306 | 2325 | 851 |
| 547536 | n/a | n/a | TGCATAGACCCCAACAGACA | 5-10-5 | 48 | 2321 | 2340 | 852 |
| 547537 | n/a | n/a | CCTGTGCATAGACCCCAACA | 5-10-5 | 65 | 2325 | 2344 | 853 |
| 547538 | n/a | n/a | CCAGCAGAAATCCTGTGCAT | 5-10-5 | 77 | 2336 | 2355 | 854 |
| 547539 | n/a | n/a | AGAACTCCAGCAGAAATCCT | 5-10-5 | 43 | 2342 | 2361 | 855 |
| 547540 | n/a | n/a | TTGTGTGGCCCTCTTAAGTC | 5-10-5 | 44 | 4794 | 4813 | 856 |
| 547541 | n/a | n/a | TATAGATGTTTATTGTAGCC | 5-10-5 | 36 | 4844 | 4863 | 857 |
| 547542 | n/a | n/a | ATACTCGCCTTTGTGACTCG | 5-10-5 | 35 | 26266 | 26285 | 858 |
| 547543 | n/a | n/a | TTTTCCATGCATACTCGCCT | 5-10-5 | 54 | 26276 | 26295 | 859 |
| 547544 | n/a | n/a | TCGCCTTTGTGATGCGATTT | 5-10-5 | 15 | 26293 | 26312 | 860 |
| 547545 | n/a | n/a | ATACTCGCCTTTGTGATGCG | 5-10-5 | 43 | 26297 | 26316 | 861 |
| 547546 | n/a | n/a | CATACTCGCCTTTGTGATGC | 5-10-5 | 11 | 26298 | 26317 | 862 |
| 547547 | n/a | n/a | GCATACTCGCCTTTGTGATG | 5-10-5 | 42 | 26299 | 26318 | 863 |
| 547548 | n/a | n/a | TGCATACTCGCCTTTGTGAT | 5-10-5 | 61 | 26300 | 26319 | 864 |
| 547549 | n/a | n/a | CCCATGCATACTCGCCTTTG | 5-10-5 | 36 | 26304 | 26323 | 865 |
| 547550 | n/a | n/a | CCCCATGCATACTCGCCTTT | 5-10-5 | 53 | 26305 | 26324 | 866 |
| 547551 | n/a | n/a | TCCCCATGCATACTCGCCTT | 5-10-5 | 38 | 26306 | 26325 | 867 |
| 547552 | n/a | n/a | CTCCCCATGCATACTCGCCT | 5-10-5 | 53 | 26307 | 26326 | 868 |
| 547553 | n/a | n/a | TGCTCCCCATGCATACTCGC | 5-10-5 | 64 | 26309 | 26328 | 869 |
| 547554 | n/a | n/a | GCTCTGATTGGGTCACCACA | 5-10-5 | 50 | 5743 | 5762 | 870 |
| 547555 | n/a | n/a | TGTCTCCTTCCACTTGCTCC | 5-10-5 | 58 | 5923 | 5942 | 871 |
| 547556 | n/a | n/a | GCCATTTTATCCCTGAGATT | 5-10-5 | 55 | 6130 | 6149 | 872 |
| 547557 | n/a | n/a | CTGTGCTGTATTTTGGAGCC | 5-10-5 | 59 | 6413 | 6432 | 873 |

TABLE 134

| | SEQ | SEQ | | | | SEQ | SEQ | |
|---|---|---|---|---|---|---|---|---|
| | ID | ID | | | | ID | ID | |
| | NO: | NO: | | | | NO. | NO. | |
| | 1 | 1 | | | | 10 | 10 | SEQ |
| ISIS | Start | Stop | | | % | Start | Stop | ID |
| NO | Site | Site | Sequence | Motif | inhibition | Site | Site | NO: |
| 531231 | n/a | n/a | TATCACTGTACTAGTTTCCT | 5-10-5 | 85 | 14744 | 14763 | 334 |
| | | | | | | 14815 | 14834 | |
| | | | | | | 14886 | 14905 | |
| | | | | | | 14945 | 14964 | |
| | | | | | | 15005 | 15024 | |
| | | | | | | 15077 | 15096 | |
| | | | | | | 15220 | 15239 | |
| | | | | | | 15292 | 15311 | |
| | | | | | | 15351 | 15370 | |
| | | | | | | 15411 | 15430 | |
| | | | | | | 15483 | 15502 | |
| | | | | | | 15555 | 15574 | |
| | | | | | | 15613 | 15632 | |
| | | | | | | 15685 | 15704 | |
| | | | | | | 15815 | 15834 | |
| | | | | | | 15887 | 15906 | |
| | | | | | | 15945 | 15964 | |
| 546732 | n/a | n/a | GGATTTGGCCCTGAGCCCCA | 5-10-5 | 14 | 6933 | 6952 | 874 |
| 546735 | n/a | n/a | CAACCTGTCCATTCCCTGGG | 5-10-5 | 46 | 7082 | 7101 | 875 |
| 546739 | n/a | n/a | ATTCGGTGTCTTTACTGGCT | 5-10-5 | 89 | 7228 | 7247 | 876 |
| 546746 | n/a | n/a | TCCTGTTGCCTGACATGCTA | 5-10-5 | 65 | 7694 | 7713 | 877 |
| 546747 | n/a | n/a | CTCCCACTGACTGACTACTC | 5-10-5 | 64 | 7904 | 7923 | 878 |
| 546749 | n/a | n/a | GCTGGTCCTTGAACCCCGTG | 5-10-5 | 53 | 8259 | 8278 | 879 |
| 546753 | n/a | n/a | CTGGCTCACTATAGGCCCCA | 5-10-5 | 91 | 8655 | 8674 | 880 |
| 546756 | n/a | n/a | ATAAGCATCTCTCTGACCTA | 5-10-5 | 47 | 9105 | 9124 | 881 |
| 546763 | n/a | n/a | GCTTCCCCAATACTTGCTGG | 5-10-5 | 84 | 9695 | 9714 | 882 |
| 546765 | n/a | n/a | GTGTCCAGAATACTGCCCCA | 5-10-5 | 82 | 10053 | 10072 | 883 |
| 546770 | n/a | n/a | GTGGACGACTGCCCTGTGCC | 5-10-5 | 74 | 10435 | 10454 | 884 |
| 546773 | n/a | n/a | TCTCTAGCATCCTAGTCCTC | 5-10-5 | 67 | 10586 | 10605 | 885 |
| 546780 | n/a | n/a | ATACTGGCTAAGTCAGGCCC | 5-10-5 | 83 | 10982 | 11001 | 886 |
| 546784 | n/a | n/a | GGCAGGGAGGTGGATTATTC | 5-10-5 | 58 | 11440 | 11459 | 887 |
| 546789 | n/a | n/a | GCTTCTCTATCTCCCAGTGT | 5-10-5 | 79 | 12228 | 12247 | 888 |
| 546791 | n/a | n/a | GATGCATGCAGCAATACAGG | 5-10-5 | 52 | 12385 | 12404 | 889 |
| 546795 | n/a | n/a | GTCTCGATGGCAAGCTGTAC | 5-10-5 | 72 | 12650 | 12669 | 890 |
| 546796 | n/a | n/a | GTACTCACCGGTACTCTGCC | 5-10-5 | 82 | 12804 | 12823 | 891 |
| 546799 | n/a | n/a | ATGAAGGGCGAGGCGCAGTG | 5-10-5 | 5 | 13258 | 13277 | 892 |
| 546803 | n/a | n/a | CCCCATACATCTATGCAAAT | 5-10-5 | 40 | 13551 | 13570 | 893 |
| 546804 | n/a | n/a | ACATGACTCCAGTGATGGAT | 5-10-5 | 57 | 13632 | 13651 | 894 |
| 546808 | n/a | n/a | AAAATGACACCAAAATTCGC | 5-10-5 | 0 | 13841 | 13860 | 895 |
| 546811 | n/a | n/a | TGGACATCCTTCCCCTCGCA | 5-10-5 | 49 | 13967 | 13986 | 896 |
| 546817 | n/a | n/a | GCTCTGAGCCTTCCGCCTCT | 5-10-5 | 77 | 14472 | 14491 | 897 |
| 546822 | n/a | n/a | ACTAGTTTCCTATAACTGCT | 5-10-5 | 32 | 14735 | 14754 | 898 |
| 546823 | n/a | n/a | TACTAGTTTCCTATAACTGC | 5-10-5 | 44 | 14736 | 14755 | 899 |
| 546824 | n/a | n/a | GTACTAGTTTCCTATAACTG | 5-10-5 | 79 | 14737 | 14756 | 900 |
| 546825 | n/a | n/a | GTATCACTGTACTAGTTTCC | 5-10-5 | 96 | 14745 | 14764 | 901 |
| | | | | | | 14816 | 14835 | |
| | | | | | | 14887 | 14906 | |
| | | | | | | 14946 | 14965 | |
| | | | | | | 15006 | 15025 | |
| | | | | | | 15078 | 15097 | |
| | | | | | | 15221 | 15240 | |
| | | | | | | 15293 | 15312 | |
| | | | | | | 15352 | 15371 | |
| | | | | | | 15412 | 15431 | |
| | | | | | | 15484 | 15503 | |
| | | | | | | 15556 | 15575 | |
| | | | | | | 15614 | 15633 | |
| | | | | | | 15686 | 15705 | |
| | | | | | | 15816 | 15835 | |
| | | | | | | 15888 | 15907 | |
| | | | | | | 15946 | 15965 | |
| 546826 | n/a | n/a | AGTATCACTGTACTAGTTTC | 5-10-5 | 90 | 14746 | 14765 | 902 |
| | | | | | | 14817 | 14836 | |
| | | | | | | 14888 | 14907 | |
| | | | | | | 14947 | 14966 | |
| | | | | | | 15007 | 15026 | |
| | | | | | | 15079 | 15098 | |
| | | | | | | 15222 | 15241 | |
| | | | | | | 15294 | 15313 | |
| | | | | | | 15353 | 15372 | |
| | | | | | | 15413 | 15432 | |
| | | | | | | 15485 | 15504 | |
| | | | | | | 15557 | 15576 | |
| | | | | | | 15615 | 15634 | |
| | | | | | | 15687 | 15706 | |
| | | | | | | 15817 | 15836 | |
| | | | | | | 15889 | 15908 | |
| | | | | | | 15947 | 15966 | |
| 546827 | n/a | n/a | CAGTATCACTGTACTAGTTT | 5-10-5 | 98 | 14747 | 14766 | 903 |
| | | | | | | 14818 | 14837 | |
| | | | | | | 14889 | 14908 | |
| | | | | | | 14948 | 14967 | |
| | | | | | | 15008 | 15027 | |
| | | | | | | 15080 | 15099 | |
| | | | | | | 15152 | 15171 | |
| | | | | | | 15223 | 15242 | |
| | | | | | | 15295 | 15314 | |
| | | | | | | 15354 | 15373 | |
| | | | | | | 15414 | 15433 | |
| | | | | | | 15486 | 15505 | |
| | | | | | | 15558 | 15577 | |
| | | | | | | 15616 | 15635 | |
| | | | | | | 15688 | 15707 | |
| | | | | | | 15818 | 15837 | |
| | | | | | | 15890 | 15909 | |
| | | | | | | 15948 | 15967 | |
| 546828 | n/a | n/a | ACAGTATCACTGTACTAGTT | 5-10-5 | 95 | 14748 | 14767 | 904 |
| | | | | | | 14819 | 14838 | |
| | | | | | | 14890 | 14909 | |
| | | | | | | 14949 | 14968 | |
| | | | | | | 15009 | 15028 | |
| | | | | | | 15081 | 15100 | |
| | | | | | | 15153 | 15172 | |
| | | | | | | 15224 | 15243 | |
| | | | | | | 15296 | 15315 | |
| | | | | | | 15355 | 15374 | |
| | | | | | | 15415 | 15434 | |
| | | | | | | 15487 | 15506 | |
| | | | | | | 15559 | 15578 | |
| | | | | | | 15617 | 15636 | |
| | | | | | | 15689 | 15708 | |
| | | | | | | 15819 | 15838 | |
| | | | | | | 15891 | 15910 | |
| | | | | | | 15949 | 15968 | |
| 546829 | n/a | n/a | AACAGTATCACTGTACTAGT | 5-10-5 | 94 | 14749 | 14768 | 905 |
| | | | | | | 14820 | 14839 | |
| | | | | | | 14891 | 14910 | |
| | | | | | | 14950 | 14969 | |
| | | | | | | 15010 | 15029 | |
| | | | | | | 15082 | 15101 | |
| | | | | | | 15154 | 15173 | |
| | | | | | | 15225 | 15244 | |
| | | | | | | 15297 | 15316 | |
| | | | | | | 15356 | 15375 | |
| | | | | | | 15416 | 15435 | |
| | | | | | | 15488 | 15507 | |
| | | | | | | 15560 | 15579 | |
| | | | | | | 15618 | 15637 | |
| | | | | | | 15690 | 15709 | |
| | | | | | | 15820 | 15839 | |
| | | | | | | 15892 | 15911 | |
| | | | | | | 15950 | 15969 | |
| 546830 | n/a | n/a | TAACAGTATCACTGTACTAG | 5-10-5 | 78 | 14750 | 14769 | 906 |
| | | | | | | 14821 | 14840 | |
| | | | | | | 14892 | 14911 | |
| | | | | | | 14951 | 14970 | |
| | | | | | | 15011 | 15030 | |
| | | | | | | 15083 | 15102 | |
| | | | | | | 15155 | 15174 | |
| | | | | | | 15226 | 15245 | |
| | | | | | | 15298 | 15317 | |
| | | | | | | 15357 | 15376 | |
| | | | | | | 15417 | 15436 | |
| | | | | | | 15489 | 15508 | |
| | | | | | | 15561 | 15580 | |
| | | | | | | 15619 | 15638 | |
| | | | | | | 15691 | 15710 | |
| | | | | | | 15821 | 15840 | |
| | | | | | | 15893 | 15912 | |
| | | | | | | 15951 | 15970 | |
| 546831 | n/a | n/a | TCTAACAGTATCACTGTACT | 5-10-5 | 79 | 14752 | 14771 | 907 |
| | | | | | | 14823 | 14842 | |
| | | | | | | 14894 | 14913 | |
| | | | | | | 15013 | 15032 | |
| | | | | | | 15085 | 15104 | |
| | | | | | | 15228 | 15247 | |
| | | | | | | 15300 | 15319 | |
| | | | | | | 15419 | 15438 | |
| | | | | | | 15491 | 15510 | |
| | | | | | | 15621 | 15640 | |
| | | | | | | 15823 | 15842 | |
| | | | | | | 15953 | 15972 | |
| 546832 | n/a | n/a | CTCTAACAGTATCACTGTAC | 5-10-5 | 88 | 14753 | 14772 | 908 |
| | | | | | | 14824 | 14843 | |
| | | | | | | 14895 | 14914 | |
| | | | | | | 15014 | 15033 | |
| | | | | | | 15086 | 15105 | |
| | | | | | | 15229 | 15248 | |
| | | | | | | 15301 | 15320 | |
| | | | | | | 15420 | 15439 | |
| | | | | | | 15492 | 15511 | |
| | | | | | | 15622 | 15641 | |
| | | | | | | 15824 | 15843 | |
| | | | | | | 15954 | 15973 | |
| 546833 | n/a | n/a | ACTCTAACAGTATCACTGTA | 5-10-5 | 90 | 14754 | 14773 | 909 |
| | | | | | | 14825 | 14844 | |
| | | | | | | 14896 | 14915 | |
| | | | | | | 15015 | 15034 | |
| | | | | | | 15087 | 15106 | |
| | | | | | | 15230 | 15249 | |
| | | | | | | 15302 | 15321 | |
| | | | | | | 15421 | 15440 | |
| | | | | | | 15493 | 15512 | |
| | | | | | | 15623 | 15642 | |
| | | | | | | 15825 | 15844 | |
| | | | | | | 15955 | 15974 | |
| 546834 | n/a | n/a | AACTCTAACAGTATCACTGT | 5-10-5 | 86 | 14755 | 14774 | 910 |
| | | | | | | 14826 | 14845 | |
| | | | | | | 14897 | 14916 | |
| | | | | | | 15016 | 15035 | |
| | | | | | | 15088 | 15107 | |
| | | | | | | 15231 | 15250 | |
| | | | | | | 15303 | 15322 | |
| | | | | | | 15422 | 15441 | |
| | | | | | | 15494 | 15513 | |
| | | | | | | 15624 | 15643 | |
| | | | | | | 15826 | 15845 | |
| | | | | | | 15956 | 15975 | |
| 546835 | n/a | n/a | TAACTCTAACAGTATCACTG | 5-10-5 | 86 | 14756 | 14775 | 911 |
| | | | | | | 14827 | 14846 | |
| | | | | | | 14898 | 14917 | |
| | | | | | | 15017 | 15036 | |
| | | | | | | 15089 | 15108 | |
| | | | | | | 15232 | 15251 | |
| | | | | | | 15304 | 15323 | |
| | | | | | | 15423 | 15442 | |
| | | | | | | 15495 | 15514 | |
| | | | | | | 15625 | 15644 | |
| | | | | | | 15827 | 15846 | |
| | | | | | | 15957 | 15976 | |
| 546836 | n/a | n/a | ATAACTCTAACAGTATCACT | 5-10-5 | 30 | 14757 | 14776 | 912 |
| | | | | | | 14828 | 14847 | |
| | | | | | | 14899 | 14918 | |
| | | | | | | 15018 | 15037 | |
| | | | | | | 15090 | 15109 | |
| | | | | | | 15233 | 15252 | |
| | | | | | | 15305 | 15324 | |
| | | | | | | 15424 | 15443 | |
| | | | | | | 15496 | 15515 | |
| | | | | | | 15626 | 15645 | |
| | | | | | | 15828 | 15847 | |
| | | | | | | 15958 | 15977 | |
| 546837 | n/a | n/a | TATAACTCTAACAGTATCAC | 5-10-5 | 0 | 14758 | 14777 | 913 |
| | | | | | | 14829 | 14848 | |
| | | | | | | 14900 | 14919 | |
| | | | | | | 15019 | 15038 | |
| | | | | | | 15091 | 15110 | |
| | | | | | | 15234 | 15253 | |
| | | | | | | 15306 | 15325 | |
| | | | | | | 15425 | 15444 | |
| | | | | | | 15497 | 15516 | |
| | | | | | | 15627 | 15646 | |
| | | | | | | 15829 | 15848 | |
| | | | | | | 15959 | 15978 | |
| 546838 | n/a | n/a | CTATAACTCTAACAGTATCA | 5-10-5 | 43 | 14759 | 14778 | 914 |
| | | | | | | 14830 | 14849 | |
| | | | | | | 14901 | 14920 | |
| | | | | | | 15020 | 15039 | |
| | | | | | | 15092 | 15111 | |
| | | | | | | 15235 | 15254 | |
| | | | | | | 15307 | 15326 | |
| | | | | | | 15426 | 15445 | |
| | | | | | | 15498 | 15517 | |
| | | | | | | 15628 | 15647 | |
| | | | | | | 15830 | 15849 | |
| | | | | | | 15960 | 15979 | |
| 546839 | n/a | n/a | CCTATAACTCTAACAGTATC | 5-10-5 | 47 | 14760 | 14779 | 915 |
| | | | | | | 14831 | 14850 | |
| | | | | | | 14902 | 14921 | |
| | | | | | | 15021 | 15040 | |
| | | | | | | 15093 | 15112 | |
| | | | | | | 15236 | 15255 | |
| | | | | | | 15308 | 15327 | |
| | | | | | | 15427 | 15446 | |
| | | | | | | 15499 | 15518 | |
| | | | | | | 15629 | 15648 | |
| | | | | | | 15831 | 15850 | |
| | | | | | | 15961 | 15980 | |
| 546840 | n/a | n/a | CTGTCCTATAACTCTAACAG | 5-10-5 | 53 | 14764 | 14783 | 916 |
| | | | | | | 14835 | 14854 | |
| 546841 | n/a | n/a | CACTGTCCTATAACTCTAAC | 5-10-5 | 38 | 14766 | 14785 | 917 |
| | | | | | | 14837 | 14856 | |
| 546842 | n/a | n/a | TCACTGTCCTATAACTCTAA | 5-10-5 | 54 | 14767 | 14786 | 918 |
| | | | | | | 14838 | 14857 | |
| 546843 | n/a | n/a | TATCACTGTCCTATAACTCT | 5-10-5 | 52 | 14769 | 14788 | 919 |
| | | | | | | 14840 | 14859 | |
| 546844 | n/a | n/a | GTCCTATATCACTGTCCTAT | 5-10-5 | 75 | 14775 | 14794 | 920 |
| | | | | | | 14846 | 14865 | |
| | | | | | | 15180 | 15199 | |
| | | | | | | 15716 | 15735 | |
| 546845 | n/a | n/a | TGTCCTATATCACTGTCCTA | 5-10-5 | 75 | 14776 | 14795 | 921 |
| | | | | | | 14847 | 14866 | |
| | | | | | | 15181 | 15200 | |
| | | | | | | 15717 | 15736 | |
| 546846 | n/a | n/a | CTGTCCTATATCACTGTCCT | 5-10-5 | 95 | 14777 | 14796 | 922 |
| | | | | | | 14848 | 14867 | |
| | | | | | | 15182 | 15201 | |
| | | | | | | 15718 | 15737 | |
| 546847 | n/a | n/a | ACTGTCCTATATCACTGTCC | 5-10-5 | 88 | 14778 | 14797 | 923 |
| | | | | | | 14849 | 14868 | |
| | | | | | | 15183 | 15202 | |
| | | | | | | 15719 | 15738 | |
| 546848 | n/a | n/a | TCACTGTCCTATATCACTGT | 5-10-5 | 86 | 14780 | 14799 | 924 |
| | | | | | | 14851 | 14870 | |
| | | | | | | 14976 | 14995 | |
| | | | | | | 15185 | 15204 | |
| | | | | | | 15257 | 15276 | |
| | | | | | | 15382 | 15401 | |
| | | | | | | 15520 | 15539 | |
| | | | | | | 15650 | 15669 | |
| | | | | | | 15721 | 15740 | |
| | | | | | | 15852 | 15871 | |
| | | | | | | 15982 | 16001 | |
| 547558 | n/a | n/a | CCCCCAGTTCCCATGCAAGG | 5-10-5 | 52 | 6640 | 6659 | 925 |
| 547559 | n/a | n/a | GAGCACAGATCTCTTCAAGT | 5-10-5 | 69 | 6822 | 6841 | 926 |
| 547560 | n/a | n/a | GACGGTCACCCAGCCCTGAC | 5-10-5 | 42 | 7459 | 7478 | 927 |
| 547561 | n/a | n/a | AAGGGAAATTAGAGGCAGGC | 5-10-5 | 57 | 7583 | 7602 | 928 |
| 547562 | n/a | n/a | CTTTCTTGAGACAATCCCTT | 5-10-5 | 59 | 8463 | 8482 | 929 |
| 547563 | n/a | n/a | GTGGGATCAGAGAATGACTA | 5-10-5 | 48 | 9267 | 9286 | 930 |
| 547564 | n/a | n/a | CCCTCTGTCTTAGATGTCCA | 5-10-5 | 94 | 9390 | 9409 | 931 |
| 547565 | n/a | n/a | CTTATCAGTCCCAGTCATGT | 5-10-5 | 63 | 10698 | 10717 | 932 |
| 547566 | n/a | n/a | AAGAGTTGGGATGCGACTCT | 5-10-5 | 76 | 11335 | 11354 | 933 |
| 547567 | n/a | n/a | TCCACTCCTAAGAAGTATGG | 5-10-5 | 60 | 11546 | 11565 | 934 |
| 547568 | n/a | n/a | GCACCCTTTTCATTGAGATT | 5-10-5 | 70 | 12070 | 12089 | 935 |
| 547569 | n/a | n/a | ACTACCATTTGGGTTGGTAG | 5-10-5 | 9 | 12571 | 12590 | 936 |
| 547570 | n/a | n/a | AAGCCCTGTTTGGTTTTTAG | 5-10-5 | 18 | 12900 | 12919 | 937 |
| 547571 | n/a | n/a | AAATGACACCAAAATTGAGT | 5-10-5 | 14 | 13744 | 13763 | 938 |
| 547572 | n/a | n/a | AAATGACACCAAAATTCGCT | 5-10-5 | 40 | 13840 | 13859 | 939 |
| 547573 | n/a | n/a | TAAGCAAGGCCTATGTGTGG | 5-10-5 | 2 | 13880 | 13899 | 940 |
| 547574 | n/a | n/a | ACACGCACAGGTCCCAGGGC | 5-10-5 | 51 | 14314 | 14333 | 941 |
| 547575 | n/a | n/a | GGGAAACTCTTTCCTCGCCC | 5-10-5 | 89 | 14583 | 14602 | 942 |
| 547576 | n/a | n/a | CTAGTTTCCTATAACTGCTG | 5-10-5 | 29 | 14734 | 14753 | 943 |
| 547577 | n/a | n/a | CTAACAGTATCACTGTACTA | 5-10-5 | 79 | 14751 | 14770 | 944 |
| | | | | | | 14822 | 14841 | |
| | | | | | | 14893 | 14912 | |
| | | | | | | 15012 | 15031 | |
| | | | | | | 15084 | 15103 | |
| | | | | | | 15227 | 15246 | |
| | | | | | | 15299 | 15318 | |
| | | | | | | 15418 | 15437 | |
| | | | | | | 15490 | 15509 | |
| | | | | | | 15620 | 15639 | |
| | | | | | | 15822 | 15841 | |
| | | | | | | 15952 | 15971 | |
| 547578 | n/a | n/a | GTCCTATAACTCTAACAGTA | 5-10-5 | 30 | 14762 | 14781 | 945 |
| | | | | | | 14833 | 14852 | |
| 547579 | n/a | n/a | TGTCCTATAACTCTAACAGT | 5-10-5 | 0 | 14763 | 14782 | 946 |
| | | | | | | 14834 | 14853 | |
| 547580 | n/a | n/a | ATCACTGTCCTATAACTCTA | 5-10-5 | 61 | 14768 | 14787 | 947 |
| | | | | | | 14839 | 14858 | |
| 547581 | n/a | n/a | ATATCACTGTCCTATAACTC | 5-10-5 | 60 | 14770 | 14789 | 948 |
| | | | | | | 14841 | 14860 | |
| 547582 | n/a | n/a | TATATCACTGTCCTATAACT | 5-10-5 | 22 | 14771 | 14790 | 949 |
| | | | | | | 14842 | 14861 | |
| | | | | | | 15176 | 15195 | |
| | | | | | | 15712 | 15731 | |
| | | | | | | 16160 | 16179 | |
| 547583 | n/a | n/a | CACTGTCCTATATCACTGTC | 5-10-5 | 80 | 14779 | 14798 | 950 |
| | | | | | | 14850 | 14869 | |
| | | | | | | 15184 | 15203 | |
| | | | | | | 15720 | 15739 | |

TABLE 135

| | SEQ | SEQ | | | | SEQ | SEQ | |
|---|---|---|---|---|---|---|---|---|
| | ID | ID | | | | ID | ID | |
| | NO: | NO: | | | | NO. | NO. | |
| | 1 | 1 | | | | 10 | 10 | SEQ |
| ISIS | Start | Stop | | | % | Start | Stop | ID |
| NO | Site | Site | Sequence | Motif | inhibition | Site | Site | NO: |
| 531231 | n/a | n/a | TATCACTGTACTAGTTTCCT | 5-10-5 | 85 | 14744 | 14763 | 334 |
| | | | | | | 14815 | 14834 | |
| | | | | | | 14886 | 14905 | |
| | | | | | | 14945 | 14964 | |
| | | | | | | 15005 | 15024 | |
| | | | | | | 15077 | 15096 | |
| | | | | | | 15220 | 15239 | |
| | | | | | | 15292 | 15311 | |
| | | | | | | 15351 | 15370 | |
| | | | | | | 15411 | 15430 | |
| | | | | | | 15483 | 15502 | |
| | | | | | | 15555 | 15574 | |
| | | | | | | 15613 | 15632 | |
| | | | | | | 15685 | 15704 | |
| | | | | | | 15815 | 15834 | |
| | | | | | | 15887 | 15906 | |
| | | | | | | 15945 | 15964 | |
| 546849 | n/a | n/a | ATCACTGTCCTATATCACTG | 5-10-5 | 93 | 14781 | 14800 | 951 |
| | | | | | | 14852 | 14871 | |
| | | | | | | 14977 | 14996 | |
| | | | | | | 15186 | 15205 | |
| | | | | | | 15258 | 15277 | |
| | | | | | | 15383 | 15402 | |
| | | | | | | 15521 | 15540 | |
| | | | | | | 15651 | 15670 | |
| | | | | | | 15722 | 15741 | |
| | | | | | | 15853 | 15872 | |
| | | | | | | 15983 | 16002 | |
| 546850 | n/a | n/a | TATCACTGTCCTATATCACT | 5-10-5 | 80 | 14782 | 14801 | 952 |
| | | | | | | 14853 | 14872 | |
| | | | | | | 14978 | 14997 | |
| | | | | | | 15116 | 15135 | |
| | | | | | | 15187 | 15206 | |
| | | | | | | 15259 | 15278 | |
| | | | | | | 15384 | 15403 | |
| | | | | | | 15522 | 15541 | |
| | | | | | | 15652 | 15671 | |
| | | | | | | 15723 | 15742 | |
| | | | | | | 15854 | 15873 | |
| | | | | | | 15984 | 16003 | |
| 546851 | n/a | n/a | AGTATCACTGTCCTATATCA | 5-10-5 | 81 | 14784 | 14803 | 953 |
| | | | | | | 14980 | 14999 | |
| | | | | | | 15118 | 15137 | |
| | | | | | | 15386 | 15405 | |
| | | | | | | 15524 | 15543 | |
| | | | | | | 15986 | 16005 | |
| 546852 | n/a | n/a | CAGTATCACTGTCCTATATC | 5-10-5 | 94 | 14785 | 14804 | 954 |
| | | | | | | 14981 | 15000 | |
| | | | | | | 15119 | 15138 | |
| | | | | | | 15387 | 15406 | |
| | | | | | | 15525 | 15544 | |
| | | | | | | 15987 | 16006 | |
| 546853 | n/a | n/a | ACAGTATCACTGTCCTATAT | 5-10-5 | 86 | 14786 | 14805 | 955 |
| | | | | | | 14982 | 15001 | |
| | | | | | | 15120 | 15139 | |
| | | | | | | 15388 | 15407 | |
| | | | | | | 15526 | 15545 | |
| | | | | | | 15988 | 16007 | |
| 546854 | n/a | n/a | TAACAGTATCACTGTCCTAT | 5-10-5 | 90 | 14788 | 14807 | 956 |
| | | | | | | 14984 | 15003 | |
| | | | | | | 15050 | 15069 | |
| | | | | | | 15122 | 15141 | |
| | | | | | | 15390 | 15409 | |
| | | | | | | 15456 | 15475 | |
| | | | | | | 15528 | 15547 | |
| | | | | | | 15990 | 16009 | |
| 546855 | n/a | n/a | ATAACAGTATCACTGTCCTA | 5-10-5 | 87 | 14789 | 14808 | 957 |
| | | | | | | 14985 | 15004 | |
| | | | | | | 15051 | 15070 | |
| | | | | | | 15123 | 15142 | |
| | | | | | | 15391 | 15410 | |
| | | | | | | 15457 | 15476 | |
| | | | | | | 15529 | 15548 | |
| | | | | | | 15991 | 16010 | |
| 546856 | n/a | n/a | AACTATAACAGTATCACTGT | 5-10-5 | 54 | 14793 | 14812 | 958 |
| | | | | | | 15055 | 15074 | |
| | | | | | | 15127 | 15146 | |
| | | | | | | 15160 | 15179 | |
| | | | | | | 15461 | 15480 | |
| | | | | | | 15533 | 15552 | |
| | | | | | | 15566 | 15585 | |
| | | | | | | 15696 | 15715 | |
| | | | | | | 15898 | 15917 | |
| | | | | | | 15995 | 16014 | |
| 546857 | n/a | n/a | TATAACTATAACAGTATCAC | 5-10-5 | 7 | 14796 | 14815 | 959 |
| | | | | | | 15058 | 15077 | |
| | | | | | | 15130 | 15149 | |
| | | | | | | 15163 | 15182 | |
| | | | | | | 15464 | 15483 | |
| | | | | | | 15536 | 15555 | |
| | | | | | | 15569 | 15588 | |
| | | | | | | 15699 | 15718 | |
| | | | | | | 15770 | 15789 | |
| | | | | | | 15998 | 16017 | |
| 546858 | n/a | n/a | CTATAACTATAACAGTATCA | 5-10-5 | 21 | 14797 | 14816 | 960 |
| | | | | | | 15059 | 15078 | |
| | | | | | | 15131 | 15150 | |
| | | | | | | 15164 | 15183 | |
| | | | | | | 15465 | 15484 | |
| | | | | | | 15537 | 15556 | |
| | | | | | | 15570 | 15589 | |
| | | | | | | 15700 | 15719 | |
| | | | | | | 15771 | 15790 | |
| | | | | | | 15999 | 16018 | |
| 546859 | n/a | n/a | TTTCCTATAACTATAACAGT | 5-10-5 | 7 | 14801 | 14820 | 961 |
| | | | | | | 15063 | 15082 | |
| | | | | | | 15469 | 15488 | |
| | | | | | | 15541 | 15560 | |
| 546860 | n/a | n/a | CTAGTTTCCTATAACTATAA | 5-10-5 | 36 | 14805 | 14824 | 962 |
| | | | | | | 14876 | 14895 | |
| | | | | | | 14935 | 14954 | |
| | | | | | | 15067 | 15086 | |
| | | | | | | 15210 | 15229 | |
| | | | | | | 15282 | 15301 | |
| | | | | | | 15341 | 15360 | |
| | | | | | | 15473 | 15492 | |
| | | | | | | 15545 | 15564 | |
| | | | | | | 15603 | 15622 | |
| | | | | | | 15675 | 15694 | |
| 546861 | n/a | n/a | TAACAATATCACTGTCCTAT | 5-10-5 | 68 | 15746 | 15765 | 963 |
| | | | | | | 15805 | 15824 | |
| | | | | | | 15877 | 15896 | |
| | | | | | | 15935 | 15954 | |
| | | | | | | 14859 | 14878 | |
| | | | | | | 15193 | 15212 | |
| | | | | | | 15265 | 15284 | |
| | | | | | | 15586 | 15605 | |
| | | | | | | 15658 | 15677 | |
| | | | | | | 15729 | 15748 | |
| | | | | | | 15860 | 15879 | |
| | | | | | | 16086 | 16105 | |
| | | | | | | 16183 | 16202 | |
| | | | | | | 16234 | 16253 | |
| 546862 | n/a | n/a | AACTATAACAATATCACTGT | 5-10-5 | 0 | 14864 | 14883 | 964 |
| | | | | | | 14923 | 14942 | |
| | | | | | | 15198 | 15217 | |
| | | | | | | 15270 | 15289 | |
| | | | | | | 15329 | 15348 | |
| | | | | | | 15591 | 15610 | |
| | | | | | | 15663 | 15682 | |
| | | | | | | 15734 | 15753 | |
| | | | | | | 15793 | 15812 | |
| | | | | | | 15865 | 15884 | |
| | | | | | | 15923 | 15942 | |
| | | | | | | 16066 | 16085 | |
| | | | | | | 16091 | 16110 | |
| | | | | | | 16144 | 16163 | |
| | | | | | | 16239 | 16258 | |
| 546863 | n/a | n/a | TAACTATAACAATATCACTG | 5-10-5 | 21 | 14865 | 14884 | 965 |
| | | | | | | 14924 | 14943 | |
| | | | | | | 15199 | 15218 | |
| | | | | | | 15271 | 15290 | |
| | | | | | | 15330 | 15349 | |
| | | | | | | 15592 | 15611 | |
| | | | | | | 15664 | 15683 | |
| | | | | | | 15735 | 15754 | |
| | | | | | | 15794 | 15813 | |
| | | | | | | 15866 | 15885 | |
| | | | | | | 15924 | 15943 | |
| | | | | | | 16067 | 16086 | |
| | | | | | | 16092 | 16111 | |
| | | | | | | 16145 | 16164 | |
| | | | | | | 16240 | 16259 | |
| 546864 | n/a | n/a | ATAACTATAACAATATCACT | 5-10-5 | 0 | 14866 | 14885 | 966 |
| | | | | | | 14925 | 14944 | |
| | | | | | | 15200 | 15219 | |
| | | | | | | 15272 | 15291 | |
| | | | | | | 15331 | 15350 | |
| | | | | | | 15593 | 15612 | |
| | | | | | | 15665 | 15684 | |
| | | | | | | 15736 | 15755 | |
| | | | | | | 15795 | 15814 | |
| | | | | | | 15867 | 15886 | |
| | | | | | | 15925 | 15944 | |
| | | | | | | 16068 | 16087 | |
| | | | | | | 16093 | 16112 | |
| | | | | | | 16146 | 16165 | |
| | | | | | | 16241 | 16260 | |
| 546865 | n/a | n/a | TATAACTATAACAATATCAC | 5-10-5 | 0 | 14867 | 14886 | 967 |
| | | | | | | 14926 | 14945 | |
| | | | | | | 15201 | 15220 | |
| | | | | | | 15273 | 15292 | |
| | | | | | | 15332 | 15351 | |
| | | | | | | 15594 | 15613 | |
| | | | | | | 15666 | 15685 | |
| | | | | | | 15737 | 15756 | |
| | | | | | | 15796 | 15815 | |
| | | | | | | 15868 | 15887 | |
| | | | | | | 15926 | 15945 | |
| | | | | | | 16069 | 16088 | |
| | | | | | | 16094 | 16113 | |
| | | | | | | 16147 | 16166 | |
| | | | | | | 16242 | 16261 | |
| 546866 | n/a | n/a | GTTTCCTATAACTATAACAA | 5-10-5 | 35 | 14873 | 14892 | 968 |
| | | | | | | 14932 | 14951 | |
| | | | | | | 15207 | 15226 | |
| | | | | | | 15279 | 15298 | |
| | | | | | | 15338 | 15357 | |
| | | | | | | 15600 | 15619 | |
| | | | | | | 15672 | 15691 | |
| | | | | | | 15743 | 15762 | |
| | | | | | | 15802 | 15821 | |
| | | | | | | 15874 | 15893 | |
| | | | | | | 15932 | 15951 | |
| 546867 | n/a | n/a | ACCTATAACTCTAACAGTAT | 5-10-5 | 40 | 14903 | 14922 | 969 |
| | | | | | | 15022 | 15041 | |
| | | | | | | 15094 | 15113 | |
| | | | | | | 15237 | 15256 | |
| | | | | | | 15309 | 15328 | |
| | | | | | | 15428 | 15447 | |
| | | | | | | 15500 | 15519 | |
| | | | | | | 15630 | 15649 | |
| | | | | | | 15832 | 15851 | |
| | | | | | | 15962 | 15981 | |
| 546868 | n/a | n/a | TACCTATAACTCTAACAGTA | 5-10-5 | 51 | 14904 | 14923 | 970 |
| | | | | | | 15023 | 15042 | |
| | | | | | | 15095 | 15114 | |
| | | | | | | 15238 | 15257 | |
| | | | | | | 15310 | 15329 | |
| | | | | | | 15429 | 15448 | |
| | | | | | | 15501 | 15520 | |
| | | | | | | 15631 | 15650 | |
| | | | | | | 15833 | 15852 | |
| | | | | | | 15963 | 15982 | |
| 546869 | n/a | n/a | TGTACCTATAACTCTAACAG | 5-10-5 | 53 | 14906 | 14925 | 971 |
| | | | | | | 15025 | 15044 | |
| | | | | | | 15240 | 15259 | |
| | | | | | | 15312 | 15331 | |
| | | | | | | 15431 | 15450 | |
| | | | | | | 15503 | 15522 | |
| | | | | | | 15633 | 15652 | |
| | | | | | | 15835 | 15854 | |
| | | | | | | 15965 | 15984 | |
| 546870 | n/a | n/a | CTGTACCTATAACTCTAACA | 5-10-5 | 87 | 14907 | 14926 | 972 |
| | | | | | | 15026 | 15045 | |
| | | | | | | 15241 | 15260 | |
| | | | | | | 15313 | 15332 | |
| | | | | | | 15432 | 15451 | |
| | | | | | | 15504 | 15523 | |
| | | | | | | 15634 | 15653 | |
| | | | | | | 15836 | 15855 | |
| | | | | | | 15966 | 15985 | |
| 546871 | n/a | n/a | ACTGTACCTATAACTCTAAC | 5-10-5 | 73 | 14908 | 14927 | 973 |
| | | | | | | 15027 | 15046 | |
| | | | | | | 15242 | 15261 | |
| | | | | | | 15314 | 15333 | |
| | | | | | | 15433 | 15452 | |
| | | | | | | 15505 | 15524 | |
| | | | | | | 15635 | 15654 | |
| | | | | | | 15837 | 15856 | |
| | | | | | | 15967 | 15986 | |
| 546872 | n/a | n/a | CACTGTACCTATAACTCTAA | 5-10-5 | 87 | 14909 | 14928 | 974 |
| | | | | | | 15028 | 15047 | |
| | | | | | | 15243 | 15262 | |
| | | | | | | 15315 | 15334 | |
| | | | | | | 15434 | 15453 | |
| | | | | | | 15506 | 15525 | |
| | | | | | | 15636 | 15655 | |
| | | | | | | 15838 | 15857 | |
| | | | | | | 15968 | 15987 | |
| 546873 | n/a | n/a | CAATATCACTGTACCTATAA | 5-10-5 | 34 | 14915 | 14934 | 975 |
| | | | | | | 15321 | 15340 | |
| | | | | | | 15785 | 15804 | |
| 546874 | n/a | n/a | ATAACAATATCACTGTACCT | 5-10-5 | 68 | 14919 | 14938 | 976 |
| | | | | | | 15325 | 15344 | |
| | | | | | | 15789 | 15808 | |
| | | | | | | 16062 | 16081 | |
| | | | | | | 16140 | 16159 | |
| 546875 | n/a | n/a | ACTATAACAATATCACTGTA | 5-10-5 | 33 | 14922 | 14941 | 977 |
| | | | | | | 15328 | 15347 | |
| | | | | | | 15792 | 15811 | |
| | | | | | | 16065 | 16084 | |
| | | | | | | 16143 | 16162 | |
| 546876 | n/a | n/a | GTCCTATATCACTGTACCTG | 5-10-5 | 87 | 14971 | 14990 | 978 |
| 546877 | n/a | n/a | CACTGTCCTATATCACTGTA | 5-10-5 | 88 | 14975 | 14994 | 979 |
| | | | | | | 15256 | 15275 | |
| | | | | | | 15381 | 15400 | |
| | | | | | | 15519 | 15538 | |
| | | | | | | 15649 | 15668 | |
| | | | | | | 15851 | 15870 | |
| | | | | | | 15981 | 16000 | |
| 546878 | n/a | n/a | CCTATAACAGTATCACTGTC | 5-10-5 | 81 | 14988 | 15007 | 980 |
| | | | | | | 15394 | 15413 | |
| 546879 | n/a | n/a | TTTCCTATAACAGTATCACT | 5-10-5 | 42 | 14991 | 15010 | 981 |
| | | | | | | 15397 | 15416 | |
| 546880 | n/a | n/a | GTTTCCTATAACAGTATCAC | 5-10-5 | 41 | 14992 | 15011 | 982 |
| | | | | | | 15398 | 15417 | |
| 546881 | n/a | n/a | AGTTTCCTATAACAGTATCA | 5-10-5 | 49 | 14993 | 15012 | 983 |
| | | | | | | 15399 | 15418 | |
| 546882 | n/a | n/a | TAGTTTCCTATAACAGTATC | 5-10-5 | 24 | 14994 | 15013 | 984 |
| | | | | | | 15400 | 15419 | |
| 546883 | n/a | n/a | CTAGTTTCCTATAACAGTAT | 5-10-5 | 19 | 14995 | 15014 | 985 |
| | | | | | | 15401 | 15420 | |
| 546884 | n/a | n/a | ACTAGTTTCCTATAACAGTA | 5-10-5 | 6 | 14996 | 15015 | 986 |
| | | | | | | 15402 | 15421 | |
| 547584 | n/a | n/a | GTATCACTGTCCTATATCAC | 5-10-5 | 85 | 14783 | 14802 | 987 |
| | | | | | | 14979 | 14998 | |
| | | | | | | 15117 | 15136 | |
| | | | | | | 15385 | 15404 | |
| | | | | | | 15523 | 15542 | |
| | | | | | | 15985 | 16004 | |
| 547585 | n/a | n/a | AACAGTATCACTGTCCTATA | 5-10-5 | 85 | 14787 | 14806 | 988 |
| | | | | | | 14983 | 15002 | |
| | | | | | | 15121 | 15140 | |
| | | | | | | 15389 | 15408 | |
| | | | | | | 15527 | 15546 | |
| | | | | | | 15989 | 16008 | |
| 547586 | n/a | n/a | TATAACAGTATCACTGTCCT | 5-10-5 | 82 | 14790 | 14809 | 989 |
| | | | | | | 14986 | 15005 | |
| | | | | | | 15052 | 15071 | |
| | | | | | | 15124 | 15143 | |
| | | | | | | 15392 | 15411 | |
| | | | | | | 15458 | 15477 | |
| | | | | | | 15530 | 15549 | |
| | | | | | | 15992 | 16011 | |
| 547587 | n/a | n/a | CTATAACAGTATCACTGTCC | 5-10-5 | 96 | 14791 | 14810 | 990 |
| | | | | | | 14987 | 15006 | |
| | | | | | | 15053 | 15072 | |
| | | | | | | 15125 | 15144 | |
| | | | | | | 15393 | 15412 | |
| | | | | | | 15459 | 15478 | |
| | | | | | | 15531 | 15550 | |
| | | | | | | 15993 | 16012 | |
| 547588 | n/a | n/a | ACTATAACAGTATCACTGTC | 5-10-5 | 83 | 14792 | 14811 | 991 |
| | | | | | | 15054 | 15073 | |
| | | | | | | 15126 | 15145 | |
| | | | | | | 15460 | 15479 | |
| | | | | | | 15532 | 15551 | |
| | | | | | | 15994 | 16013 | |
| 547589 | n/a | n/a | TAACTATAACAGTATCACTG | 5-10-5 | 36 | 14794 | 14813 | 992 |
| | | | | | | 15056 | 15075 | |
| | | | | | | 15128 | 15147 | |
| | | | | | | 15161 | 15180 | |
| | | | | | | 15462 | 15481 | |
| | | | | | | 15534 | 15553 | |
| | | | | | | 15567 | 15586 | |
| | | | | | | 15697 | 15716 | |
| | | | | | | 15996 | 16015 | |
| 547590 | n/a | n/a | ATAACTATAACAGTATCACT | 5-10-5 | 0 | 14795 | 14814 | 993 |
| | | | | | | 15057 | 15076 | |
| | | | | | | 15129 | 15148 | |
| | | | | | | 15162 | 15181 | |
| | | | | | | 15463 | 15482 | |
| | | | | | | 15535 | 15554 | |
| | | | | | | 15568 | 15587 | |
| | | | | | | 15698 | 15717 | |
| | | | | | | 15997 | 16016 | |
| 547591 | n/a | n/a | CCTATAACTATAACAGTATC | 5-10-5 | 23 | 14798 | 14817 | 994 |
| | | | | | | 15060 | 15079 | |
| | | | | | | 15165 | 15184 | |
| | | | | | | 15466 | 15485 | |
| | | | | | | 15538 | 15557 | |
| | | | | | | 15571 | 15590 | |
| | | | | | | 15701 | 15720 | |
| | | | | | | 15772 | 15791 | |
| | | | | | | 16000 | 16019 | |
| 547592 | n/a | n/a | TCCTATAACTATAACAGTAT | 5-10-5 | 27 | 14799 | 14818 | 995 |
| | | | | | | 15061 | 15080 | |
| | | | | | | 15166 | 15185 | |
| | | | | | | 15467 | 15486 | |
| | | | | | | 15539 | 15558 | |
| | | | | | | 15572 | 15591 | |
| | | | | | | 15702 | 15721 | |
| | | | | | | 16001 | 16020 | |
| 547593 | n/a | n/a | TTCCTATAACTATAACAGTA | 5-10-5 | 29 | 14800 | 14819 | 996 |
| | | | | | | 15062 | 15081 | |
| | | | | | | 15468 | 15487 | |
| | | | | | | 15540 | 15559 | |
| 547594 | n/a | n/a | GTTTCCTATAACTATAACAG | 5-10-5 | 19 | 14802 | 14821 | 997 |
| | | | | | | 15064 | 15083 | |
| | | | | | | 15470 | 15489 | |
| | | | | | | 15542 | 15561 | |
| 547595 | n/a | n/a | ACTAGTTTCCTATAACTATA | 5-10-5 | 21 | 14806 | 14825 | 998 |
| | | | | | | 14877 | 14896 | |
| | | | | | | 14936 | 14955 | |
| | | | | | | 15068 | 15087 | |
| | | | | | | 15211 | 15230 | |
| | | | | | | 15283 | 15302 | |
| | | | | | | 15342 | 15361 | |
| | | | | | | 15474 | 15493 | |
| | | | | | | 15546 | 15565 | |
| | | | | | | 15604 | 15623 | |
| | | | | | | 15676 | 15695 | |
| | | | | | | 15747 | 15766 | |
| | | | | | | 15806 | 15825 | |
| | | | | | | 15878 | 15897 | |
| | | | | | | 15936 | 15955 | |
| 547596 | n/a | n/a | TACTAGTTTCCTATAACTAT | 5-10-5 | 14 | 14807 | 14826 | 999 |
| | | | | | | 14878 | 14897 | |
| | | | | | | 14937 | 14956 | |
| | | | | | | 15069 | 15088 | |
| | | | | | | 15212 | 15231 | |
| | | | | | | 15284 | 15303 | |
| | | | | | | 15343 | 15362 | |
| | | | | | | 15475 | 15494 | |
| | | | | | | 15547 | 15566 | |
| | | | | | | 15605 | 15624 | |
| | | | | | | 15677 | 15696 | |
| | | | | | | 15748 | 15767 | |
| | | | | | | 15807 | 15826 | |
| | | | | | | 15879 | 15898 | |
| | | | | | | 15937 | 15956 | |
| 547597 | n/a | n/a | CAATATCACTGTCCTATATC | 5-10-5 | 29 | 14856 | 14875 | 1000 |
| | | | | | | 15190 | 15209 | |
| | | | | | | 15262 | 15281 | |
| | | | | | | 15655 | 15674 | |
| | | | | | | 15726 | 15745 | |
| | | | | | | 15857 | 15876 | |
| 547598 | n/a | n/a | ACTATAACAATATCACTGTC | 5-10-5 | 59 | 14863 | 14882 | 1001 |
| | | | | | | 15197 | 15216 | |
| | | | | | | 15269 | 15288 | |
| | | | | | | 15590 | 15609 | |
| | | | | | | 15662 | 15681 | |
| | | | | | | 15733 | 15752 | |
| | | | | | | 15864 | 15883 | |
| | | | | | | 15922 | 15941 | |
| | | | | | | 16090 | 16109 | |
| | | | | | | 16238 | 16257 | |
| 547599 | n/a | n/a | TTCCTATAACTATAACAATA | 5-10-5 | 4 | 14871 | 14890 | 1002 |
| | | | | | | 14930 | 14949 | |
| | | | | | | 15205 | 15224 | |
| | | | | | | 15277 | 15296 | |
| | | | | | | 15336 | 15355 | |
| | | | | | | 15598 | 15617 | |
| | | | | | | 15670 | 15689 | |
| | | | | | | 15741 | 15760 | |
| | | | | | | 15800 | 15819 | |
| | | | | | | 15872 | 15891 | |
| | | | | | | 15930 | 15949 | |
| 547600 | n/a | n/a | TTTCCTATAACTATAACAAT | 5-10-5 | 26 | 14872 | 14891 | 1003 |
| | | | | | | 14931 | 14950 | |
| | | | | | | 15206 | 15225 | |
| | | | | | | 15278 | 15297 | |
| | | | | | | 15337 | 15356 | |
| | | | | | | 15599 | 15618 | |
| | | | | | | 15671 | 15690 | |
| | | | | | | 15742 | 15761 | |
| | | | | | | 15801 | 15820 | |
| | | | | | | 15873 | 15892 | |
| | | | | | | 15931 | 15950 | |
| 547601 | n/a | n/a | GTACCTATAACTCTAACAGT | 5-10-5 | 75 | 14905 | 14924 | 1004 |
| | | | | | | 15024 | 15043 | |
| | | | | | | 15239 | 15258 | |
| | | | | | | 15311 | 15330 | |
| | | | | | | 15430 | 15449 | |
| | | | | | | 15502 | 15521 | |
| | | | | | | 15632 | 15651 | |
| | | | | | | 15834 | 15853 | |
| | | | | | | 15964 | 15983 | |
| 547602 | n/a | n/a | TCACTGTACCTATAACTCTA | 5-10-5 | 93 | 14910 | 14929 | 1005 |
| | | | | | | 15029 | 15048 | |
| | | | | | | 15244 | 15263 | |
| | | | | | | 15316 | 15335 | |
| | | | | | | 15435 | 15454 | |
| | | | | | | 15507 | 15526 | |
| | | | | | | 15637 | 15656 | |
| | | | | | | 15839 | 15858 | |
| | | | | | | 15969 | 15988 | |
| 547603 | n/a | n/a | TATCACTGTACCTATAACTC | 5-10-5 | 41 | 14912 | 14931 | 1006 |
| | | | | | | 15246 | 15265 | |
| | | | | | | 15318 | 15337 | |
| | | | | | | 15509 | 15528 | |
| | | | | | | 15639 | 15658 | |
| | | | | | | 15841 | 15860 | |
| | | | | | | 15971 | 15990 | |
| 547604 | n/a | n/a | ATATCACTGTACCTATAACT | 5-10-5 | 0 | 14913 | 14932 | 1007 |
| | | | | | | 15247 | 15266 | |
| | | | | | | 15319 | 15338 | |
| | | | | | | 15510 | 15529 | |
| | | | | | | 15640 | 15659 | |
| | | | | | | 15783 | 15802 | |
| | | | | | | 15842 | 15861 | |
| | | | | | | 15972 | 15991 | |
| 547605 | n/a | n/a | ACAATATCACTGTACCTATA | 5-10-5 | 43 | 14916 | 14935 | 1008 |
| | | | | | | 15322 | 15341 | |
| | | | | | | 15786 | 15805 | |
| | | | | | | 16137 | 16156 | |
| 547606 | n/a | n/a | AACAATATCACTGTACCTAT | 5-10-5 | 43 | 14917 | 14936 | 1009 |
| | | | | | | 15323 | 15342 | |
| | | | | | | 15787 | 15806 | |
| | | | | | | 16138 | 16157 | |
| 547607 | n/a | n/a | TAACAATATCACTGTACCTA | 5-10-5 | 49 | 14918 | 14937 | 1010 |
| | | | | | | 15324 | 15343 | |
| | | | | | | 15788 | 15807 | |
| | | | | | | 16139 | 16158 | |
| 547608 | n/a | n/a | TATAACAATATCACTGTACC | 5-10-5 | 35 | 14920 | 14939 | 1011 |
| | | | | | | 15326 | 15345 | |
| | | | | | | 15790 | 15809 | |
| | | | | | | 16063 | 16082 | |
| | | | | | | 16141 | 16160 | |
| 547609 | n/a | n/a | CTATAACAATATCACTGTAC | 5-10-5 | 23 | 14921 | 14940 | 1012 |
| | | | | | | 15327 | 15346 | |
| | | | | | | 15791 | 15810 | |
| | | | | | | 16064 | 16083 | |
| | | | | | | 16142 | 16161 | |
| 547610 | n/a | n/a | TGTAACAGTATCACTGTACT | 5-10-5 | 45 | 14953 | 14972 | 1013 |
| 547611 | n/a | n/a | CTGTAACAGTATCACTGTAC | 5-10-5 | 71 | 14954 | 14973 | 1014 |
| 547612 | n/a | n/a | CCTGTAACAGTATCACTGTA | 5-10-5 | 68 | 14955 | 14974 | 1015 |
| 547613 | n/a | n/a | CTATATCACTGTACCTGTAA | 5-10-5 | 39 | 14968 | 14987 | 1016 |
| 547614 | n/a | n/a | CCTATATCACTGTACCTGTA | 5-10-5 | 81 | 14969 | 14988 | 1017 |
| 547615 | n/a | n/a | TCCTATATCACTGTACCTGT | 5-10-5 | 84 | 14970 | 14989 | 1018 |
| 547616 | n/a | n/a | TGTCCTATATCACTGTACCT | 5-10-5 | 86 | 14972 | 14991 | 1019 |
| | | | | | | 15253 | 15272 | |
| | | | | | | 15378 | 15397 | |
| | | | | | | 15516 | 15535 | |
| | | | | | | 15646 | 15665 | |
| | | | | | | 15848 | 15867 | |
| | | | | | | 15978 | 15997 | |
| 547617 | n/a | n/a | CTGTCCTATATCACTGTACC | 5-10-5 | 91 | 14973 | 14992 | 1020 |
| | | | | | | 15254 | 15273 | |
| | | | | | | 15379 | 15398 | |
| | | | | | | 15517 | 15536 | |
| | | | | | | 15647 | 15666 | |
| | | | | | | 15849 | 15868 | |
| | | | | | | 15979 | 15998 | |
| 547618 | n/a | n/a | ACTGTCCTATATCACTGTAC | 5-10-5 | 87 | 14974 | 14993 | 1021 |
| | | | | | | 15255 | 15274 | |
| | | | | | | 15380 | 15399 | |
| | | | | | | 15518 | 15537 | |
| | | | | | | 15648 | 15667 | |
| | | | | | | 15850 | 15869 | |
| | | | | | | 15980 | 15999 | |
| 547619 | n/a | n/a | TCCTATAACAGTATCACTGT | 5-10-5 | 70 | 14989 | 15008 | 1022 |
| | | | | | | 15395 | 15414 | |
| 547620 | n/a | n/a | TTCCTATAACAGTATCACTG | 5-10-5 | 65 | 14990 | 15009 | 1023 |
| | | | | | | 15396 | 15415 | |
| 547621 | n/a | n/a | TACTAGTTTCCTATAACAGT | 5-10-5 | 12 | 14997 | 15016 | 1024 |
| | | | | | | 15403 | 15422 | |
| 547622 | n/a | n/a | GTCACTGTACCTATAACTCT | 5-10-5 | 88 | 15030 | 15049 | 1025 |
| | | | | | | 15436 | 15455 | |
| 547623 | n/a | n/a | TGTCACTGTACCTATAACTC | 5-10-5 | 81 | 15031 | 15050 | 1026 |
| | | | | | | 15437 | 15456 | |
| 547624 | n/a | n/a | ATGTCACTGTACCTATAACT | 5-10-5 | 64 | 15032 | 15051 | 1027 |
| | | | | | | 15438 | 15457 | |

TABLE 136

| | SEQ | SEQ | | | | SEQ | SEQ | |
|---|---|---|---|---|---|---|---|---|
| | ID | ID | | | | ID | ID | |
| | NO: | NO: | | | | NO: | NO: | |
| | 1 | 1 | | | | 10 | 10 | |
| ISIS | Start | Stop | | % | | Start | Stop | SEQ ID |
| NO | Site | Site | Sequence | inhibition | Motif | Site | Site | NO |
| 531231 | n/a | n/a | TATCACTGTACTAGTTTCCT | 93 | 5-10-5 | 14744 | 14763 | 334 |
| | | | | | | 14815 | 14834 | |
| | | | | | | 14886 | 14905 | |
| | | | | | | 14945 | 14964 | |
| | | | | | | 15005 | 15024 | |
| | | | | | | 15077 | 15096 | |
| | | | | | | 15220 | 15239 | |
| | | | | | | 15292 | 15311 | |
| | | | | | | 15351 | 15370 | |
| | | | | | | 15411 | 15430 | |
| | | | | | | 15483 | 15502 | |
| | | | | | | 15555 | 15574 | |
| | | | | | | 15613 | 15632 | |
| | | | | | | 15685 | 15704 | |
| | | | | | | 15815 | 15834 | |
| | | | | | | 15887 | 15906 | |
| | | | | | | 15945 | 15964 | |
| 546885 | n/a | n/a | TATGTCACTGTACCTATAAC | 46 | 5-10-5 | 15033 | 15052 | 1028 |
| | | | | | | 15439 | 15458 | |
| 546886 | n/a | n/a | CTATGTCACTGTACCTATAA | 80 | 5-10-5 | 15034 | 15053 | 1029 |
| | | | | | | 15440 | 15459 | |
| 546887 | n/a | n/a | CCTATGTCACTGTACCTATA | 82 | 5-10-5 | 15035 | 15054 | 1030 |
| | | | | | | 15441 | 15460 | |
| 546888 | n/a | n/a | TCCTATGTCACTGTACCTAT | 78 | 5-10-5 | 15036 | 15055 | 1031 |
| | | | | | | 15442 | 15461 | |
| 546889 | n/a | n/a | GTCCTATGTCACTGTACCTA | 93 | 5-10-5 | 15037 | 15056 | 1032 |
| | | | | | | 15443 | 15462 | |
| 546890 | n/a | n/a | TGTCCTATGTCACTGTACCT | 78 | 5-10-5 | 15038 | 15057 | 1033 |
| | | | | | | 15444 | 15463 | |
| 546891 | n/a | n/a | CTGTCCTATGTCACTGTACC | 81 | 5-10-5 | 15039 | 15058 | 1034 |
| | | | | | | 15445 | 15464 | |
| 546892 | n/a | n/a | ACTGTCCTATGTCACTGTAC | 82 | 5-10-5 | 15040 | 15059 | 1035 |
| | | | | | | 15446 | 15465 | |
| 546893 | n/a | n/a | CACTGTCCTATGTCACTGTA | 70 | 5-10-5 | 15041 | 15060 | 1036 |
| | | | | | | 15447 | 15466 | |
| 546894 | n/a | n/a | TCACTGTCCTATGTCACTGT | 91 | 5-10-5 | 15042 | 15061 | 1037 |
| | | | | | | 15448 | 15467 | |
| 546895 | n/a | n/a | TATCACTGTCCTATGTCACT | 77 | 5-10-5 | 15044 | 15063 | 1038 |
| | | | | | | 15450 | 15469 | |
| 546896 | n/a | n/a | GTATCACTGTCCTATGTCAC | 75 | 5-10-5 | 15045 | 15064 | 1039 |
| | | | | | | 15451 | 15470 | |
| 546897 | n/a | n/a | AGTATCACTGTCCTATGTCA | 90 | 5-10-5 | 15046 | 15065 | 1040 |
| | | | | | | 15452 | 15471 | |
| 546898 | n/a | n/a | AACAGTATCACTGTCCTATG | 91 | 5-10-5 | 15049 | 15068 | 1041 |
| | | | | | | 15455 | 15474 | |
| 546899 | n/a | n/a | CTACCTATAACTCTAACAGT | 27 | 5-10-5 | 15096 | 15115 | 1042 |
| 546901 | n/a | n/a | ACTGTCCTATAACTATAACA | 56 | 5-10-5 | 15170 | 15189 | 1043 |
| | | | | | | 15576 | 15595 | |
| | | | | | | 15706 | 15725 | |
| | | | | | | 16005 | 16024 | |
| | | | | | | 16076 | 16095 | |
| | | | | | | 16101 | 16120 | |
| | | | | | | 16154 | 16173 | |
| 546902 | n/a | n/a | CACTGTCCTATAACTATAAC | 71 | 5-10-5 | 15171 | 15190 | 1044 |
| | | | | | | 15577 | 15596 | |
| | | | | | | 15707 | 15726 | |
| | | | | | | 16006 | 16025 | |
| | | | | | | 16077 | 16096 | |
| | | | | | | 16102 | 16121 | |
| | | | | | | 16155 | 16174 | |
| 546903 | n/a | n/a | CCTATATCACTGTACCTATA | 91 | 5-10-5 | 15250 | 15269 | 1045 |
| | | | | | | 15375 | 15394 | |
| | | | | | | 15513 | 15532 | |
| | | | | | | 15643 | 15662 | |
| | | | | | | 15845 | 15864 | |
| | | | | | | 15975 | 15994 | |
| 546904 | n/a | n/a | TCCTATATCACTGTACCTAT | 80 | 5-10-5 | 15251 | 15270 | 1046 |
| | | | | | | 15376 | 15395 | |
| | | | | | | 15514 | 15533 | |
| | | | | | | 15644 | 15663 | |
| | | | | | | 15846 | 15865 | |
| | | | | | | 15976 | 15995 | |
| 546905 | n/a | n/a | TACCTATAACAGTATCACTG | 65 | 5-10-5 | 15363 | 15382 | 1047 |
| 546907 | n/a | n/a | ATAACTATAACAGTATCACC | 37 | 5-10-5 | 15769 | 15788 | 1048 |
| 546908 | n/a | n/a | TCACTGTACCTATAACTATA | 77 | 5-10-5 | 15780 | 15799 | 1049 |
| | | | | | | 16252 | 16271 | |
| 546909 | n/a | n/a | AACAATATCACTGTACCTTT | 44 | 5-10-5 | 16060 | 16079 | 1050 |
| 546910 | n/a | n/a | TAACAATATCACTGTACCTT | 82 | 5-10-5 | 16061 | 16080 | 1051 |
| 546911 | n/a | n/a | GTCCTATAACTATAACAATA | 52 | 5-10-5 | 16073 | 16092 | 1052 |
| | | | | | | 16098 | 16117 | |
| | | | | | | 16151 | 16170 | |
| 547625 | n/a | n/a | CAGTATCACTGTCCTATGTC | 79 | 5-10-5 | 15047 | 15066 | 1053 |
| | | | | | | 15453 | 15472 | |
| 547626 | n/a | n/a | ACAGTATCACTGTCCTATGT | 91 | 5-10-5 | 15048 | 15067 | 1054 |
| | | | | | | 15454 | 15473 | |
| 547627 | n/a | n/a | TCTACCTATAACTCTAACAG | 71 | 5-10-5 | 15097 | 15116 | 1055 |
| 547628 | n/a | n/a | CTCTACCTATAACTCTAACA | 34 | 5-10-5 | 15098 | 15117 | 1056 |
| 547629 | n/a | n/a | ACTCTACCTATAACTCTAAC | 0 | 5-10-5 | 15099 | 15118 | 1057 |
| 547630 | n/a | n/a | ACTGTCCTATATCACTCTAC | 76 | 5-10-5 | 15112 | 15131 | 1058 |
| 547631 | n/a | n/a | CACTGTCCTATATCACTCTA | 85 | 5-10-5 | 15113 | 15132 | 1059 |
| 547632 | n/a | n/a | TCACTGTCCTATATCACTCT | 87 | 5-10-5 | 15114 | 15133 | 1060 |
| 547633 | n/a | n/a | ATCACTGTCCTATATCACTC | 87 | 5-10-5 | 15115 | 15134 | 1061 |
| 547634 | n/a | n/a | ATCACTGTACTAGTTTTCTA | 72 | 5-10-5 | 15148 | 15167 | 1062 |
| 547635 | n/a | n/a | TATCACTGTACTAGTTTTCT | 53 | 5-10-5 | 15149 | 15168 | 1063 |
| 547636 | n/a | n/a | GTATCACTGTACTAGTTTTC | 86 | 5-10-5 | 15150 | 15169 | 1064 |
| 547637 | n/a | n/a | AGTATCACTGTACTAGTTTT | 88 | 5-10-5 | 15151 | 15170 | 1065 |
| 547638 | n/a | n/a | ATAACAGTATCACTGTACTA | 87 | 5-10-5 | 15156 | 15175 | 1066 |
| | | | | | | 15358 | 15377 | |
| | | | | | | 15562 | 15581 | |
| | | | | | | 15692 | 15711 | |
| | | | | | | 15894 | 15913 | |
| 547639 | n/a | n/a | GTCCTATAACTATAACAGTA | 72 | 5-10-5 | 15167 | 15186 | 1067 |
| | | | | | | 15573 | 15592 | |
| | | | | | | 15703 | 15722 | |
| | | | | | | 16002 | 16021 | |
| 547640 | n/a | n/a | TGTCCTATAACTATAACAGT | 13 | 5-10-5 | 15168 | 15187 | 1068 |
| | | | | | | 15574 | 15593 | |
| | | | | | | 15704 | 15723 | |
| | | | | | | 16003 | 16022 | |
| 547641 | n/a | n/a | CTGTCCTATAACTATAACAG | 43 | 5-10-5 | 15169 | 15188 | 1069 |
| | | | | | | 15575 | 15594 | |
| | | | | | | 15705 | 15724 | |
| | | | | | | 16004 | 16023 | |
| 547642 | n/a | n/a | TCACTGTCCTATAACTATAA | 72 | 5-10-5 | 15172 | 15191 | 1070 |
| | | | | | | 15578 | 15597 | |
| | | | | | | 15708 | 15727 | |
| | | | | | | 16007 | 16026 | |
| | | | | | | 16078 | 16097 | |
| | | | | | | 16103 | 16122 | |
| | | | | | | 16156 | 16175 | |
| 547643 | n/a | n/a | ATCACTGTCCTATAACTATA | 72 | 5-10-5 | 15173 | 15192 | 1071 |
| | | | | | | 15579 | 15598 | |
| | | | | | | 15709 | 15728 | |
| | | | | | | 16008 | 16027 | |
| | | | | | | 16079 | 16098 | |
| | | | | | | 16104 | 16123 | |
| | | | | | | 16157 | 16176 | |
| | | | | | | 16176 | 16195 | |
| 547644 | n/a | n/a | TATCACTGTCCTATAACTAT | 51 | 5-10-5 | 15174 | 15193 | 1072 |
| | | | | | | 15580 | 15599 | |
| | | | | | | 15710 | 15729 | |
| | | | | | | 16009 | 16028 | |
| | | | | | | 16080 | 16099 | |
| | | | | | | 16158 | 16177 | |
| | | | | | | 16177 | 16196 | |
| | | | | | | 16228 | 16247 | |
| 547645 | n/a | n/a | ATATCACTGTCCTATAACTA | 60 | 5-10-5 | 15175 | 15194 | 1073 |
| | | | | | | 15581 | 15600 | |
| | | | | | | 15711 | 15730 | |
| | | | | | | 16010 | 16029 | |
| | | | | | | 16081 | 16100 | |
| | | | | | | 16159 | 16178 | |
| | | | | | | 16178 | 16197 | |
| | | | | | | 16229 | 16248 | |
| 547646 | n/a | n/a | CTATATCACTGTACCTATAA | 23 | 5-10-5 | 15249 | 15268 | 1074 |
| | | | | | | 15374 | 15393 | |
| | | | | | | 15512 | 15531 | |
| | | | | | | 15642 | 15661 | |
| | | | | | | 15844 | 15863 | |
| | | | | | | 15974 | 15993 | |
| 547647 | n/a | n/a | GTCCTATATCACTGTACCTA | 92 | 5-10-5 | 15252 | 15271 | 1075 |
| | | | | | | 15377 | 15396 | |
| | | | | | | 15515 | 15534 | |
| | | | | | | 15645 | 15664 | |
| | | | | | | 15847 | 15866 | |
| | | | | | | 15977 | 15996 | |
| 547648 | n/a | n/a | CCTATAACAGTATCACTGTA | 83 | 5-10-5 | 15361 | 15380 | 1076 |
| 547649 | n/a | n/a | ACCTATAACAGTATCACTGT | 73 | 5-10-5 | 15362 | 15381 | 1077 |
| 547650 | n/a | n/a | GTACCTATAACAGTATCACT | 32 | 5-10-5 | 15364 | 15383 | 1078 |
| 547651 | n/a | n/a | TGTACCTATAACAGTATCAC | 48 | 5-10-5 | 15365 | 15384 | 1079 |
| 547652 | n/a | n/a | TCACTGTACCTATAACAGTA | 59 | 5-10-5 | 15369 | 15388 | 1080 |
| 547653 | n/a | n/a | ATCACTGTACCTATAACAGT | 57 | 5-10-5 | 15370 | 15389 | 1081 |
| 547654 | n/a | n/a | TATCACTGTACCTATAACAG | 53 | 5-10-5 | 15371 | 15390 | 1082 |
| 547655 | n/a | n/a | AATATCACTGTCCTATAACT | 37 | 5-10-5 | 15582 | 15601 | 1083 |
| | | | | | | 16011 | 16030 | |
| | | | | | | 16082 | 16101 | |
| | | | | | | 16179 | 16198 | |
| | | | | | | 16230 | 16249 | |
| 547656 | n/a | n/a | CAATATCACTGTCCTATAAC | 42 | 5-10-5 | 15583 | 15602 | 1084 |
| | | | | | | 16083 | 16102 | |
| | | | | | | 16180 | 16199 | |
| | | | | | | 16231 | 16250 | |
| 547657 | n/a | n/a | ACAATATCACTGTCCTATAA | 43 | 5-10-5 | 15584 | 15603 | 1085 |
| | | | | | | 16084 | 16103 | |
| | | | | | | 16181 | 16200 | |
| | | | | | | 16232 | 16251 | |
| 547658 | n/a | n/a | CGTACTAGTTTCCTATAACT | 68 | 5-10-5 | 15750 | 15769 | 1086 |
| 547659 | n/a | n/a | ACTATAACAGTATCACCGTA | 80 | 5-10-5 | 15766 | 15785 | 1087 |
| 547660 | n/a | n/a | AACTATAACAGTATCACCGT | 68 | 5-10-5 | 15767 | 15786 | 1088 |
| 547661 | n/a | n/a | TAACTATAACAGTATCACCG | 80 | 5-10-5 | 15768 | 15787 | 1089 |
| 547662 | n/a | n/a | ACCTATAACTATAACAGTAT | 0 | 5-10-5 | 15773 | 15792 | 1090 |
| 547663 | n/a | n/a | TACCTATAACTATAACAGTA | 10 | 5-10-5 | 15774 | 15793 | 1091 |
| 547664 | n/a | n/a | GTACCTATAACTATAACAGT | 2 | 5-10-5 | 15775 | 15794 | 1092 |
| 547665 | n/a | n/a | TGTACCTATAACTATAACAG | 10 | 5-10-5 | 15776 | 15795 | 1093 |
| 547666 | n/a | n/a | ATCACTGTACCTATAACTAT | 71 | 5-10-5 | 15781 | 15800 | 1094 |
| | | | | | | 16253 | 16272 | |
| 547667 | n/a | n/a | TATCACTGTACCTATAACTA | 55 | 5-10-5 | 15782 | 15801 | 1095 |
| 547668 | n/a | n/a | CAACTATAACAGTATCACTG | 44 | 5-10-5 | 15899 | 15918 | 1096 |
| 547669 | n/a | n/a | ACAACTATAACAGTATCACT | 0 | 5-10-5 | 15900 | 15919 | 1097 |
| 547670 | n/a | n/a | TACAACTATAACAGTATCAC | 0 | 5-10-5 | 15901 | 15920 | 1098 |
| 547671 | n/a | n/a | CTACAACTATAACAGTATCA | 0 | 5-10-5 | 15902 | 15921 | 1099 |
| 547672 | n/a | n/a | CAATATCACTGTCCTACAAC | 36 | 5-10-5 | 15915 | 15934 | 1100 |
| 547673 | n/a | n/a | GAATATCACTGTCCTATAAC | 21 | 5-10-5 | 16012 | 16031 | 1101 |
| 547674 | n/a | n/a | ACAATATCACTGTACCTTTA | 53 | 5-10-5 | 16059 | 16078 | 1102 |
| 547675 | n/a | n/a | TGTCCTATAACTATAACAAT | 10 | 5-10-5 | 16074 | 16093 | 1103 |
| | | | | | | 16099 | 16118 | |
| | | | | | | 16152 | 16171 | |
| 547676 | n/a | n/a | CTGTCCTATAACTATAACAA | 41 | 5-10-5 | 16075 | 16094 | 1104 |
| | | | | | | 16100 | 16119 | |
| | | | | | | 16153 | 16172 | |

TABLE 137

| | SEQ | SEQ | | | | SEQ | SEQ | |
|---|---|---|---|---|---|---|---|---|
| | ID | ID | | | | ID | ID | |
| | NO: | NO: | | | | NO: | NO: | |
| | 1 | 1 | | | | 10 | 10 | |
| ISIS | Start | Stop | | | % | Start | Stop | SEQ ID |
| NO | Site | Site | Sequence | Motif | inhibition | Site | Site | NO |
| 531231 | n/a | n/a | TATCACTGTACTAGTTTCCT | 5-10-5 | 93 | 14744 | 14763 | 334 |
| | | | | | | 14815 | 14834 | |
| | | | | | | 14886 | 14905 | |
| | | | | | | 14945 | 14964 | |
| | | | | | | 15005 | 15024 | |
| | | | | | | 15077 | 15096 | |
| | | | | | | 15220 | 15239 | |
| | | | | | | 15292 | 15311 | |
| | | | | | | 15351 | 15370 | |
| | | | | | | 15411 | 15430 | |
| | | | | | | 15483 | 15502 | |
| | | | | | | 15555 | 15574 | |
| | | | | | | 15613 | 15632 | |
| | | | | | | 15685 | 15704 | |
| | | | | | | 15815 | 15834 | |
| | | | | | | 15887 | 15906 | |
| | | | | | | 15945 | 15964 | |
| 546529 | n/a | n/a | GCACCTGGCAGAACAGTACC | 5-10-5 | 65 | 26419 | 26438 | 1105 |
| 546578 | n/a | n/a | GACAGTGGGCCAGAGCCTTG | 5-10-5 | 73 | 26686 | 26705 | 1106 |
| 546912 | n/a | n/a | ACATCACTGTCCTATAACTA | 5-10-5 | 26 | 16106 | 16125 | 1107 |
| 546913 | n/a | n/a | GTACCTATATCACTGTAACT | 5-10-5 | 38 | 16126 | 16145 | 1108 |
| 546914 | n/a | n/a | ATATCACTGTACCTATATCA | 5-10-5 | 52 | 16134 | 16153 | 1109 |
| 546915 | n/a | n/a | TCACTGTCCTATAACTATAT | 5-10-5 | 39 | 16175 | 16194 | 1110 |
| 546916 | n/a | n/a | CGTCACTGTACCTATAACTG | 5-10-5 | 92 | 16203 | 16222 | 1111 |
| 546917 | n/a | n/a | ATCACTGTCCTATAACTATT | 5-10-5 | 63 | 16227 | 16246 | 1112 |
| 546918 | n/a | n/a | AACATCACTGTACCTATAAC | 5-10-5 | 14 | 16256 | 16275 | 1113 |
| 546926 | n/a | n/a | GCCATCCAGGGTGCTCTCCC | 5-10-5 | 81 | 16839 | 16858 | 1114 |
| 546931 | n/a | n/a | GCCCCCGGAGCACCTTCACT | 5-10-5 | 58 | 17205 | 17224 | 1115 |
| 546935 | n/a | n/a | CGTGGTTAGCCTGACATCTC | 5-10-5 | 86 | 17412 | 17431 | 1116 |
| 546939 | n/a | n/a | GCCATCTGGTTAGCCTCCGA | 5-10-5 | 89 | 17664 | 17683 | 1117 |
| 546942 | n/a | n/a | TACACTGAACCCCCTTAGGC | 5-10-5 | 56 | 18570 | 18589 | 1118 |
| 546943 | n/a | n/a | CAGTTTGGCCTTTCCATCTC | 5-10-5 | 54 | 18819 | 18838 | 1119 |
| 546944 | n/a | n/a | GCCACTAACCCACCTCTTAA | 5-10-5 | 42 | 19140 | 19159 | 1120 |
| 546946 | n/a | n/a | ACTCCCATCTACTCCCCCAT | 5-10-5 | 41 | 19291 | 19310 | 1121 |
| 546954 | n/a | n/a | CTGCTGATTGTGTCTGGCTC | 5-10-5 | 71 | 20235 | 20254 | 1122 |
| 546955 | n/a | n/a | ACAAGGCTTCGAGGACAGCC | 5-10-5 | 49 | 20339 | 20358 | 1123 |
| 546964 | n/a | n/a | GCGATTCCTTGCCTCTGCTG | 5-10-5 | 53 | 21550 | 21569 | 1124 |
| 546967 | n/a | n/a | CACCGCGCGAATGCCTGCCT | 5-10-5 | 93 | 22657 | 22676 | 1125 |
| 546969 | n/a | n/a | ATCCAACCTCTCTCCCTATC | 5-10-5 | 53 | 22901 | 22920 | 1126 |
| 546970 | n/a | n/a | GCCCAAGCCTACATGCATAC | 5-10-5 | 61 | 23426 | 23445 | 1127 |
| 546975 | n/a | n/a | GGCCTGGATACAGCCTTTCT | 5-10-5 | 70 | 23825 | 23844 | 1128 |
| 546977 | n/a | n/a | GTCCCGAAGAGTCAAGTCCA | 5-10-5 | 76 | 24253 | 24272 | 1129 |
| 546979 | n/a | n/a | ACTGTTGTCCATAGCAGCAT | 5-10-5 | 71 | 24504 | 24523 | 1130 |
| 546980 | n/a | n/a | AGCCCTCAATTGTTGCTGGT | 5-10-5 | 79 | 24664 | 24683 | 1131 |
| 546983 | n/a | n/a | GATGACCTGCAGATGCACAG | 5-10-5 | 74 | 24978 | 24997 | 1132 |
| 546986 | n/a | n/a | CAGGATAGAACTGATGGTCC | 5-10-5 | 91 | 25318 | 25337 | 1133 |
| 546990 | n/a | n/a | AGAACAGGAGACAATCCACT | 5-10-5 | 49 | 25680 | 25699 | 1134 |
| 546994 | n/a | n/a | GTTCATGTGGCAACCTGTGA | 5-10-5 | 58 | 26112 | 26131 | 1135 |
| 547677 | n/a | n/a | CATCACTGTCCTATAACTAT | 5-10-5 | 62 | 16105 | 16124 | 1136 |
| 547678 | n/a | n/a | TACCTATATCACTGTAACTA | 5-10-5 | 21 | 16125 | 16144 | 1137 |
| 547679 | n/a | n/a | TGTACCTATATCACTGTAAC | 5-10-5 | 28 | 16127 | 16146 | 1138 |
| 547680 | n/a | n/a | TATCACTGTACCTATATCAC | 5-10-5 | 41 | 16133 | 16152 | 1139 |
| 547681 | n/a | n/a | AATATCACTGTACCTATATC | 5-10-5 | 6 | 16135 | 16154 | 1140 |
| 547682 | n/a | n/a | CAATATCACTGTACCTATAT | 5-10-5 | 20 | 16136 | 16155 | 1141 |
| 547683 | n/a | n/a | ACTATATCACTGTCCTATAA | 5-10-5 | 33 | 16162 | 16181 | 1142 |
| 547684 | n/a | n/a | TAACTATATCACTGTCCTAT | 5-10-5 | 43 | 16164 | 16183 | 1143 |
| 547685 | n/a | n/a | ATAACTATATCACTGTCCTA | 5-10-5 | 35 | 16165 | 16184 | 1144 |
| 547686 | n/a | n/a | CTGTCCTATAACTATATCAC | 5-10-5 | 36 | 16172 | 16191 | 1145 |
| 547687 | n/a | n/a | ACTGTCCTATAACTATATCA | 5-10-5 | 41 | 16173 | 16192 | 1146 |
| 547688 | n/a | n/a | CACTGTCCTATAACTATATC | 5-10-5 | 47 | 16174 | 16193 | 1147 |
| 547689 | n/a | n/a | GTAACAATATCACTGTCCTA | 5-10-5 | 73 | 16184 | 16203 | 1148 |
| 547690 | n/a | n/a | CTGTAACAATATCACTGTCC | 5-10-5 | 76 | 16186 | 16205 | 1149 |
| 547691 | n/a | n/a | ACTGTAACAATATCACTGTC | 5-10-5 | 36 | 16187 | 16206 | 1150 |
| 547692 | n/a | n/a | CACTGTACCTATAACTGTAA | 5-10-5 | 47 | 16200 | 16219 | 1151 |
| 547693 | n/a | n/a | TCACTGTACCTATAACTGTA | 5-10-5 | 61 | 16201 | 16220 | 1152 |
| 547694 | n/a | n/a | GTCACTGTACCTATAACTGT | 5-10-5 | 92 | 16202 | 16221 | 1153 |
| 547695 | n/a | n/a | ACTGTCCTATAACTATTACA | 5-10-5 | 31 | 16224 | 16243 | 1154 |
| 547696 | n/a | n/a | CACTGTCCTATAACTATTAC | 5-10-5 | 26 | 16225 | 16244 | 1155 |
| 547697 | n/a | n/a | TCACTGTCCTATAACTATTA | 5-10-5 | 63 | 16226 | 16245 | 1156 |
| 547698 | n/a | n/a | ACCTATAACTATAACAATAT | 5-10-5 | 0 | 16245 | 16264 | 1157 |
| 547699 | n/a | n/a | TACCTATAACTATAACAATA | 5-10-5 | 10 | 16246 | 16265 | 1158 |
| 547700 | n/a | n/a | GTACCTATAACTATAACAAT | 5-10-5 | 0 | 16247 | 16266 | 1159 |
| 547701 | n/a | n/a | CATCACTGTACCTATAACTA | 5-10-5 | 49 | 16254 | 16273 | 1160 |
| 547702 | n/a | n/a | ACATCACTGTACCTATAACT | 5-10-5 | 44 | 16255 | 16274 | 1161 |
| 547703 | n/a | n/a | CAACATCACTGTACCTATAA | 5-10-5 | 25 | 16257 | 16276 | 1162 |
| 547704 | n/a | n/a | ACATCTTGTCATTAACATCC | 5-10-5 | 61 | 16435 | 16454 | 1163 |
| 547705 | n/a | n/a | GCACCCAATACAGGGCCAGG | 5-10-5 | 69 | 16512 | 16531 | 1164 |
| 547706 | n/a | n/a | TGCCTCCTGGCAGCCTTCAA | 5-10-5 | 73 | 16694 | 16713 | 1165 |
| 547707 | n/a | n/a | TGAAAAGCCACGCCCTTAGC | 5-10-5 | 32 | 16975 | 16994 | 1166 |
| 547708 | n/a | n/a | GCCAGGAGACAGCCCTACTC | 5-10-5 | 67 | 17055 | 17074 | 1167 |
| 547709 | n/a | n/a | AGCCCAATGTCCTAACCTGT | 5-10-5 | 76 | 17791 | 17810 | 1168 |
| 547710 | n/a | n/a | TGCGGTTATATGGGCTGAAG | 5-10-5 | 85 | 19540 | 19559 | 1169 |
| 547711 | n/a | n/a | CCTTTAGCCACTCCTCTTGC | 5-10-5 | 45 | 20061 | 20080 | 1170 |
| 547712 | n/a | n/a | CCCCATGGTACCAAAGCCAT | 5-10-5 | 79 | 20528 | 20547 | 1171 |
| 547713 | n/a | n/a | CTCAATGCCACCCTTTCCCC | 5-10-5 | 37 | 20880 | 20899 | 1172 |
| 547714 | n/a | n/a | CTGTCTAACTGGCCTGGCTG | 5-10-5 | 19 | 21326 | 21345 | 1173 |
| 547715 | n/a | n/a | GGTCAGAAGGCCTCTTATTC | 5-10-5 | 21 | 21750 | 21769 | 1174 |
| 547716 | n/a | n/a | CCATCTGTCCCCTCAATCCC | 5-10-5 | 9 | 22197 | 22216 | 1175 |
| 547717 | n/a | n/a | ACTCTGGCACTGGTCATGGA | 5-10-5 | 54 | 22761 | 22780 | 1176 |
| 547718 | n/a | n/a | ATAAAGTGCGATTAAGCCCC | 5-10-5 | 86 | 23515 | 23534 | 1177 |
| 547719 | n/a | n/a | TACCAAGCTTGTAGAAGGGA | 5-10-5 | 69 | 23633 | 23652 | 1178 |
| 547720 | n/a | n/a | GAAAGACGGCCAATGGGAAA | 5-10-5 | 8 | 24177 | 24196 | 1179 |
| 547721 | n/a | n/a | CTCTATCAAAATCCTGCTGC | 5-10-5 | 68 | 25527 | 25546 | 1180 |
| 547722 | n/a | n/a | CTCCAGTCACCACCATTGCC | 5-10-5 | 80 | 25860 | 25879 | 1181 |

TABLE 138

| | SEQ | SEQ | | | | SEQ | SEQ | |
|---|---|---|---|---|---|---|---|---|
| | ID | ID | | | | ID | ID | |
| | NO: | NO: | | | | NO: | NO: | |
| | 1 | 1 | | | | 10 | 10 | |
| ISIS | Start | Stop | | | % | Start | Stop | SEQ ID |
| NO | Site | Site | Sequence | Motif | inhibition | Site | Site | NO |
| 531231 | n/a | n/a | TATCACTGTACTAGTTTCCT | 5-10-5 | 91 | 14744 | 14763 | 334 |
| | | | | | | 14815 | 14834 | |
| | | | | | | 14886 | 14905 | |
| | | | | | | 14945 | 14964 | |
| | | | | | | 15005 | 15024 | |
| | | | | | | 15077 | 15096 | |
| | | | | | | 15220 | 15239 | |
| | | | | | | 15292 | 15311 | |
| | | | | | | 15351 | 15370 | |
| | | | | | | 15411 | 15430 | |
| | | | | | | 15483 | 15502 | |
| | | | | | | 15555 | 15574 | |
| | | | | | | 15613 | 15632 | |
| | | | | | | 15685 | 15704 | |
| | | | | | | 15815 | 15834 | |
| | | | | | | 15887 | 15906 | |
| | | | | | | 15945 | 15964 | |
| 546599 | n/a | n/a | AAGAGTAAGCCTTCACAGGG | 5-10-5 | 82 | 27583 | 27602 | 1182 |
| 546606 | n/a | n/a | CTCACCAGAGTTGTCCCCAG | 5-10-5 | 0 | 27722 | 27741 | 1183 |
| 546999 | n/a | n/a | GCAGCTCACACCCAAAAAGC | 5-10-5 | 29 | 27004 | 27023 | 1184 |
| 547000 | n/a | n/a | TCTGTTACCTTGAGGATTGT | 5-10-5 | 63 | 27276 | 27295 | 1185 |
| 547006 | n/a | n/a | CGCCATCTGCCCTGTACAGA | 5-10-5 | 39 | 28248 | 28267 | 1186 |
| 547008 | n/a | n/a | TTGGTGGTGGGATTGGTGGT | 5-10-5 | 81 | 28333 | 28352 | 1187 |
| | | | | | | 28388 | 28407 | |
| | | | | | | 28443 | 28462 | |
| | | | | | | 28608 | 28627 | |
| | | | | | | 28620 | 28639 | |
| 547009 | n/a | n/a | AATTGGTGGTGGGATTGGTG | 5-10-5 | 73 | 28335 | 28354 | 1188 |
| 547010 | n/a | n/a | GAATTGGTGGTGGGATTGGT | 5-10-5 | 39 | 28336 | 28355 | 1189 |
| 547011 | n/a | n/a | GGCAGGATTGGTGGTGGAAT | 5-10-5 | 22 | 28352 | 28371 | 1190 |
| 547013 | n/a | n/a | TGAGATTGGTGGTGGGTGGC | 5-10-5 | 0 | 28369 | 28388 | 1191 |
| 547015 | n/a | n/a | GGTGGTGGGATTGGTGCTGA | 5-10-5 | 55 | 28429 | 28448 | 1192 |
| 547016 | n/a | n/a | GTAGGTGGTGGGATTGGTGG | 5-10-5 | 62 | 28456 | 28475 | 1193 |
| | | | | | | 28535 | 28554 | |
| 547017 | n/a | n/a | GGTAGGTGGTGGGATTGGTG | 5-10-5 | 61 | 28457 | 28476 | 1194 |
| | | | | | | 28536 | 28555 | |
| 547018 | n/a | n/a | GGTGGCGGGATTGGTGGTGG | 5-10-5 | 58 | 28477 | 28496 | 1195 |
| | | | | | | 28556 | 28575 | |
| 547019 | n/a | n/a | GATCGGTGGTGGGATTGGTC | 5-10-5 | 83 | 28500 | 28519 | 1196 |
| | | | | | | 28579 | 28598 | |
| 547020 | n/a | n/a | GGATCGGTGGTGGGATTGGT | 5-10-5 | 47 | 28501 | 28520 | 1197 |
| | | | | | | 28580 | 28599 | |
| 547021 | n/a | n/a | TTGGTGGCGGGATCGGTGGT | 5-10-5 | 57 | 28510 | 28529 | 1198 |
| | | | | | | 28589 | 28608 | |
| 547022 | n/a | n/a | ATTGGTGGCGGGATCGGTGG | 5-10-5 | 69 | 28511 | 28530 | 1199 |
| 547023 | n/a | n/a | GATTGGTGGCGGGATCGGTG | 5-10-5 | 91 | 28512 | 28531 | 1200 |
| 547024 | n/a | n/a | GGATTGGTGGCGGGATCGGT | 5-10-5 | 56 | 28513 | 28532 | 1201 |
| 547025 | n/a | n/a | TGGTGGTGGGATTGGTGGTT | 5-10-5 | 72 | 28607 | 28626 | 1202 |
| 547029 | n/a | n/a | TCTTCTAGGGCCACACCTCT | 5-10-5 | 50 | 28891 | 28910 | 1203 |
| 547035 | n/a | n/a | TGGTCCCAAATTGGAGTGCA | 5-10-5 | 40 | 29383 | 29402 | 1204 |
| 547039 | n/a | n/a | TCTCTATACAGCTGGGCACA | 5-10-5 | 0 | 29997 | 30016 | 1205 |
| 547049 | n/a | n/a | CACTTCCCAGCAACCCTCAC | 5-10-5 | 20 | 30765 | 30784 | 1206 |
| 547055 | n/a | n/a | GCTCCTGGCAGCAATGACCC | 5-10-5 | 70 | 31104 | 31123 | 1207 |
| 547059 | n/a | n/a | GGGTATCTTCACTGTTCCAG | 5-10-5 | 12 | 31540 | 31559 | 1208 |
| 547063 | n/a | n/a | CGTCATGCTTACCTTTCTCC | 5-10-5 | 23 | 31955 | 31974 | 1209 |
| 547069 | n/a | n/a | GCCCTCCGAGCTTTGGCAAC | 5-10-5 | 35 | 32581 | 32600 | 1210 |
| 547071 | n/a | n/a | GCAGCCCCCCAGAAATCCCA | 5-10-5 | 27 | 32708 | 32727 | 1211 |
| 547076 | n/a | n/a | TCTCAAGCAGCCTATTGTGT | 5-10-5 | 14 | 33263 | 33282 | 1212 |
| 547080 | n/a | n/a | GTGCAAGACCTTGCTTGCCA | 5-10-5 | 54 | 33657 | 33676 | 1213 |
| 547081 | n/a | n/a | CTGTAGTCCACTACACAGCA | 5-10-5 | 83 | 33801 | 33820 | 1214 |
| 547082 | n/a | n/a | TCTCCCTGAGTCACAGTGGA | 5-10-5 | 64 | 33881 | 33900 | 1215 |
| 547085 | n/a | n/a | CCAGGTGCAGCACGGAGAGG | 5-10-5 | 44 | 34479 | 34498 | 1216 |
| 547723 | n/a | n/a | TAGAATGGCAGGGTTCTGTG | 5-10-5 | 53 | 27357 | 27376 | 1217 |
| 547724 | n/a | n/a | GATGCATCCAACACTTACCC | 5-10-5 | 16 | 28059 | 28078 | 1218 |
| 547725 | n/a | n/a | ATTGGTGGTGGGATTGGTGG | 5-10-5 | 26 | 28334 | 28353 | 1219 |
| | | | | | | 28389 | 28408 | |
| | | | | | | 28444 | 28463 | |
| | | | | | | 28523 | 28542 | |
| | | | | | | 28609 | 28628 | |
| | | | | | | 28621 | 28640 | |
| 547726 | n/a | n/a | GCAGGATTGGTGGTGGAATT | 5-10-5 | 0 | 28351 | 28370 | 1220 |
| 547727 | n/a | n/a | TGGCAGGATTGGTGGTGGAA | 5-10-5 | 0 | 28353 | 28372 | 1221 |
| 547728 | n/a | n/a | GAGATTGGTGGTGGGTGGCA | 5-10-5 | 88 | 28368 | 28387 | 1222 |
| 547729 | n/a | n/a | GTGAGATTGGTGGTGGGTGG | 5-10-5 | 45 | 28370 | 28389 | 1223 |
| 547730 | n/a | n/a | GATTGGTGGTGGGATTGGTG | 5-10-5 | 60 | 28390 | 28409 | 1224 |
| | | | | | | 28433 | 28452 | |
| | | | | | | 28445 | 28464 | |
| | | | | | | 28524 | 28543 | |
| | | | | | | 28610 | 28629 | |
| | | | | | | 28622 | 28641 | |
| 547731 | n/a | n/a | GGATTGGTGGTGGGATTGGT | 5-10-5 | 49 | 28391 | 28410 | 1225 |
| | | | | | | 28434 | 28453 | |
| | | | | | | 28446 | 28465 | |
| | | | | | | 28525 | 28544 | |
| | | | | | | 28611 | 28630 | |
| | | | | | | 28623 | 28642 | |
| 547732 | n/a | n/a | AGGATTGGTGGTGGGATTGG | 5-10-5 | 0 | 28392 | 28411 | 1226 |
| 547733 | n/a | n/a | TAGGATTGGTGGTGGGATTG | 5-10-5 | 0 | 28393 | 28412 | 1227 |
| 547734 | n/a | n/a | GTAGGATTGGTGGTGGGATT | 5-10-5 | 14 | 28394 | 28413 | 1228 |
| 547735 | n/a | n/a | GGTAGGATTGGTGGTGGGAT | 5-10-5 | 39 | 28395 | 28414 | 1229 |
| 547736 | n/a | n/a | TGGTAGGATTGGTGGTGGGA | 5-10-5 | 54 | 28396 | 28415 | 1230 |
| 547737 | n/a | n/a | TGGTGGTGGGATTGGTGCTG | 5-10-5 | 59 | 28430 | 28449 | 1231 |
| 547738 | n/a | n/a | TTGGTGGTGGGATTGGTGCT | 5-10-5 | 41 | 28431 | 28450 | 1232 |
| 547739 | n/a | n/a | ATTGGTGGTGGGATTGGTGC | 5-10-5 | 12 | 28432 | 28451 | 1233 |
| 547740 | n/a | n/a | AGGTGGTGGGATTGGTGGTG | 5-10-5 | 30 | 28454 | 28473 | 1234 |
| | | | | | | 28533 | 28552 | |
| 547741 | n/a | n/a | TAGGTGGTGGGATTGGTGGT | 5-10-5 | 47 | 28455 | 28474 | 1235 |
| | | | | | | 28534 | 28553 | |
| 547742 | n/a | n/a | ATCGGTGGTGGGATTGGTCG | 5-10-5 | 57 | 28499 | 28518 | 1236 |
| | | | | | | 28578 | 28597 | |
| 547743 | n/a | n/a | GGTGGTGGGATTGGTGGCGG | 5-10-5 | 61 | 28520 | 28539 | 1237 |
| 547744 | n/a | n/a | TGGTGGTGGGATTGGTGGCG | 5-10-5 | 65 | 28521 | 28540 | 1238 |
| 547745 | n/a | n/a | TTGGTGGTGGGATTGGTGGC | 5-10-5 | 55 | 28522 | 28541 | 1239 |
| 547746 | n/a | n/a | GTTGGTGGCGGGATCGGTGG | 5-10-5 | 0 | 28590 | 28609 | 1240 |
| 547748 | n/a | n/a | GGTTGGTGGCGGGATCGGTG | 5-10-5 | 78 | 28591 | 28610 | 1241 |
| 547750 | n/a | n/a | TGGTTGGTGGCGGGATCGGT | 5-10-5 | 41 | 28592 | 28611 | 1242 |
| 547752 | n/a | n/a | GTGGTTGGTGGCGGGATCGG | 5-10-5 | 41 | 28593 | 28612 | 1243 |
| 547754 | n/a | n/a | GGGATTGGTGGTTGGTGGCG | 5-10-5 | 47 | 28600 | 28619 | 1244 |
| 547756 | n/a | n/a | GGGTCTTGCTCCACCCACAT | 5-10-5 | 49 | 29244 | 29263 | 1245 |
| 547758 | n/a | n/a | CCAAGTAGTGCAAGGCATGT | 5-10-5 | 24 | 29540 | 29559 | 1246 |
| 547760 | n/a | n/a | ATCATGCTTACTGCAAGTGA | 5-10-5 | 19 | 30219 | 30238 | 1247 |
| 547762 | n/a | n/a | TGAAACTGGGCAGTCCTTCC | 5-10-5 | 0 | 30417 | 30436 | 1248 |
| 547764 | n/a | n/a | CCACCTTCTTACATATGCTA | 5-10-5 | 24 | 30644 | 30663 | 1249 |
| 547766 | n/a | n/a | GCCTCTCAGACGGCACAGAC | 5-10-5 | 0 | 30902 | 30921 | 1250 |
| 547768 | n/a | n/a | TTGCCCTCACACATTCGAAT | 5-10-5 | 0 | 30977 | 30996 | 1251 |
| 547770 | n/a | n/a | TGCTTTCTGCCCAACCTCTA | 5-10-5 | 48 | 31727 | 31746 | 1252 |
| 547772 | n/a | n/a | CTGTGCTCCCGGCCATTAGC | 5-10-5 | 0 | 32312 | 32331 | 1253 |
| 547774 | n/a | n/a | GAGACAGTTTGGCAAGCTAC | 5-10-5 | 46 | 32389 | 32408 | 1254 |
| 547776 | n/a | n/a | GGAGAGAGACGGCACCCTGT | 5-10-5 | 48 | 32828 | 32847 | 1255 |
| 547778 | n/a | n/a | TCACCTGTGAGTAACCAATA | 5-10-5 | 53 | 33085 | 33104 | 1256 |
| 547780 | n/a | n/a | CCCCTCTTAAATAGCACATG | 5-10-5 | 67 | 33441 | 33460 | 1257 |
| 547782 | n/a | n/a | CCAAGTATCTCATGTGCCTG | 5-10-5 | 67 | 33580 | 33599 | 1258 |

TABLE 139

| | SEQ | SEQ | | | | SEQ | SEQ | |
|---|---|---|---|---|---|---|---|---|
| | ID | ID | | | | ID | ID | |
| | NO: | NO: | | | | NO: | NO: | |
| | 1 | 1 | | | | 10 | 10 | |
| ISIS | Start | Stop | | | % | Start | Stop | SEQ ID |
| NO | Site | Site | Sequence | Motif | inhibition | Site | Site | NO |
| 531231 | n/a | n/a | TATCACTGTACTAGTTTCCT | 5-10-5 | 90 | 14744 | 14763 | 334 |
| | | | | | | 14815 | 14834 | |
| | | | | | | 14886 | 14905 | |
| | | | | | | 14945 | 14964 | |
| | | | | | | 15005 | 15024 | |
| | | | | | | 15077 | 15096 | |
| | | | | | | 15220 | 15239 | |
| | | | | | | 15292 | 15311 | |
| | | | | | | 15351 | 15370 | |
| | | | | | | 15411 | 15430 | |
| | | | | | | 15483 | 15502 | |
| | | | | | | 15555 | 15574 | |
| | | | | | | 15613 | 15632 | |
| | | | | | | 15685 | 15704 | |
| | | | | | | 15815 | 15834 | |
| | | | | | | 15887 | 15906 | |
| | | | | | | 15945 | 15964 | |
| 548706 | n/a | n/a | CTAGTTTCCTATAACT | 3-10-3 | 0 | 14738 | 14753 | 1259 |
| | | | | | | 14809 | 14824 | |
| | | | | | | 14880 | 14895 | |
| | | | | | | 14939 | 14954 | |
| | | | | | | 15071 | 15086 | |
| | | | | | | 15214 | 15229 | |
| | | | | | | 15286 | 15301 | |
| | | | | | | 15345 | 15360 | |
| | | | | | | 15477 | 15492 | |
| | | | | | | 15549 | 15564 | |
| | | | | | | 15607 | 15622 | |
| | | | | | | 15679 | 15694 | |
| | | | | | | 15750 | 15765 | |
| | | | | | | 15809 | 15824 | |
| | | | | | | 15881 | 15896 | |
| | | | | | | 15939 | 15954 | |
| 548707 | n/a | n/a | ACTAGTTTCCTATAAC | 3-10-3 | 10 | 14739 | 14754 | 1260 |
| | | | | | | 14810 | 14825 | |
| | | | | | | 14881 | 14896 | |
| | | | | | | 14940 | 14955 | |
| | | | | | | 15000 | 15015 | |
| | | | | | | 15072 | 15087 | |
| | | | | | | 15215 | 15230 | |
| | | | | | | 15287 | 15302 | |
| | | | | | | 15346 | 15361 | |
| | | | | | | 15406 | 15421 | |
| | | | | | | 15478 | 15493 | |
| | | | | | | 15550 | 15565 | |
| | | | | | | 15608 | 15623 | |
| | | | | | | 15680 | 15695 | |
| | | | | | | 15751 | 15766 | |
| | | | | | | 15810 | 15825 | |
| | | | | | | 15882 | 15897 | |
| | | | | | | 15940 | 15955 | |
| 548708 | n/a | n/a | TACTAGTTTCCTATAA | 3-10-3 | 0 | 14740 | 14755 | 1261 |
| | | | | | | 14811 | 14826 | |
| | | | | | | 14882 | 14897 | |
| | | | | | | 14941 | 14956 | |
| | | | | | | 15001 | 15016 | |
| | | | | | | 15073 | 15088 | |
| | | | | | | 15216 | 15231 | |
| | | | | | | 15288 | 15303 | |
| | | | | | | 15347 | 15362 | |
| | | | | | | 15407 | 15422 | |
| | | | | | | 15479 | 15494 | |
| | | | | | | 15551 | 15566 | |
| | | | | | | 15609 | 15624 | |
| | | | | | | 15681 | 15696 | |
| | | | | | | 15752 | 15767 | |
| | | | | | | 15811 | 15826 | |
| | | | | | | 15883 | 15898 | |
| | | | | | | 15941 | 15956 | |
| 548709 | n/a | n/a | GTACTAGTTTCCTATA | 3-10-3 | 0 | 14741 | 14756 | 1262 |
| | | | | | | 14812 | 14827 | |
| | | | | | | 14883 | 14898 | |
| | | | | | | 14942 | 14957 | |
| | | | | | | 15002 | 15017 | |
| | | | | | | 15074 | 15089 | |
| | | | | | | 15217 | 15232 | |
| | | | | | | 15289 | 15304 | |
| | | | | | | 15348 | 15363 | |
| | | | | | | 15408 | 15423 | |
| | | | | | | 15480 | 15495 | |
| | | | | | | 15552 | 15567 | |
| | | | | | | 15610 | 15625 | |
| | | | | | | 15682 | 15697 | |
| | | | | | | 15753 | 15768 | |
| | | | | | | 15812 | 15827 | |
| | | | | | | 15884 | 15899 | |
| | | | | | | 15942 | 15957 | |
| 548710 | n/a | n/a | TGTACTAGTTTCCTAT | 3-10-3 | 0 | 14742 | 14757 | 1263 |
| | | | | | | 14813 | 14828 | |
| | | | | | | 14884 | 14899 | |
| | | | | | | 14943 | 14958 | |
| | | | | | | 15003 | 15018 | |
| | | | | | | 15075 | 15090 | |
| | | | | | | 15218 | 15233 | |
| | | | | | | 15290 | 15305 | |
| | | | | | | 15349 | 15364 | |
| | | | | | | 15409 | 15424 | |
| | | | | | | 15481 | 15496 | |
| | | | | | | 15553 | 15568 | |
| | | | | | | 15611 | 15626 | |
| | | | | | | 15683 | 15698 | |
| | | | | | | 15813 | 15828 | |
| | | | | | | 15885 | 15900 | |
| | | | | | | 15943 | 15958 | |
| 548711 | n/a | n/a | CTGTACTAGTTTCCTA | 3-10-3 | 21 | 14743 | 14758 | 1264 |
| | | | | | | 14814 | 14829 | |
| | | | | | | 14885 | 14900 | |
| | | | | | | 14944 | 14959 | |
| | | | | | | 15004 | 15019 | |
| | | | | | | 15076 | 15091 | |
| | | | | | | 15219 | 15234 | |
| | | | | | | 15291 | 15306 | |
| | | | | | | 15350 | 15365 | |
| | | | | | | 15410 | 15425 | |
| | | | | | | 15482 | 15497 | |
| | | | | | | 15554 | 15569 | |
| | | | | | | 15612 | 15627 | |
| | | | | | | 15684 | 15699 | |
| | | | | | | 15814 | 15829 | |
| | | | | | | 15886 | 15901 | |
| | | | | | | 15944 | 15959 | |
| 548712 | n/a | n/a | ACTGTACTAGTTTCCT | 3-10-3 | 9 | 14744 | 14759 | 1265 |
| | | | | | | 14815 | 14830 | |
| | | | | | | 14886 | 14901 | |
| | | | | | | 14945 | 14960 | |
| | | | | | | 15005 | 15020 | |
| | | | | | | 15077 | 15092 | |
| | | | | | | 15220 | 15235 | |
| | | | | | | 15292 | 15307 | |
| | | | | | | 15351 | 15366 | |
| | | | | | | 15411 | 15426 | |
| | | | | | | 15483 | 15498 | |
| | | | | | | 15555 | 15570 | |
| | | | | | | 15613 | 15628 | |
| | | | | | | 15685 | 15700 | |
| | | | | | | 15815 | 15830 | |
| | | | | | | 15887 | 15902 | |
| | | | | | | 15945 | 15960 | |
| 548713 | n/a | n/a | CACTGTACTAGTTTCC | 3-10-3 | 33 | 14745 | 14760 | 1266 |
| | | | | | | 14816 | 14831 | |
| | | | | | | 14887 | 14902 | |
| | | | | | | 14946 | 14961 | |
| | | | | | | 15006 | 15021 | |
| | | | | | | 15078 | 15093 | |
| | | | | | | 15221 | 15236 | |
| | | | | | | 15293 | 15308 | |
| | | | | | | 15352 | 15367 | |
| | | | | | | 15412 | 15427 | |
| | | | | | | 15484 | 15499 | |
| | | | | | | 15556 | 15571 | |
| | | | | | | 15614 | 15629 | |
| | | | | | | 15686 | 15701 | |
| | | | | | | 15816 | 15831 | |
| | | | | | | 15888 | 15903 | |
| | | | | | | 15946 | 15961 | |
| 548714 | n/a | n/a | TCACTGTACTAGTTTC | 3-10-3 | 15 | 14746 | 14761 | 1267 |
| | | | | | | 14817 | 14832 | |
| | | | | | | 14888 | 14903 | |
| | | | | | | 14947 | 14962 | |
| | | | | | | 15007 | 15022 | |
| | | | | | | 15079 | 15094 | |
| | | | | | | 15222 | 15237 | |
| | | | | | | 15294 | 15309 | |
| | | | | | | 15353 | 15368 | |
| | | | | | | 15413 | 15428 | |
| | | | | | | 15485 | 15500 | |
| | | | | | | 15557 | 15572 | |
| | | | | | | 15615 | 15630 | |
| | | | | | | 15687 | 15702 | |
| | | | | | | 15817 | 15832 | |
| | | | | | | 15889 | 15904 | |
| | | | | | | 15947 | 15962 | |
| 548715 | n/a | n/a | ATCACTGTACTAGTTT | 3-10-3 | 0 | 14747 | 14762 | 1268 |
| | | | | | | 14818 | 14833 | |
| | | | | | | 14889 | 14904 | |
| | | | | | | 14948 | 14963 | |
| | | | | | | 15008 | 15023 | |
| | | | | | | 15080 | 15095 | |
| | | | | | | 15152 | 15167 | |
| | | | | | | 15223 | 15238 | |
| | | | | | | 15295 | 15310 | |
| | | | | | | 15354 | 15369 | |
| | | | | | | 15414 | 15429 | |
| | | | | | | 15486 | 15501 | |
| | | | | | | 15558 | 15573 | |
| | | | | | | 15616 | 15631 | |
| | | | | | | 15688 | 15703 | |
| | | | | | | 15818 | 15833 | |
| | | | | | | 15890 | 15905 | |
| | | | | | | 15948 | 15963 | |
| | | | | | | 14748 | 14763 | |
| 548716 | n/a | n/a | TATCACTGTACTAGTT | 3-10-3 | 10 | 14819 | 14834 | 1269 |
| | | | | | | 14890 | 14905 | |
| | | | | | | 14949 | 14964 | |
| | | | | | | 15009 | 15024 | |
| | | | | | | 15081 | 15096 | |
| | | | | | | 15153 | 15168 | |
| | | | | | | 15224 | 15239 | |
| | | | | | | 15296 | 15311 | |
| | | | | | | 15355 | 15370 | |
| | | | | | | 15415 | 15430 | |
| | | | | | | 15487 | 15502 | |
| | | | | | | 15559 | 15574 | |
| | | | | | | 15617 | 15632 | |
| | | | | | | 15689 | 15704 | |
| | | | | | | 15819 | 15834 | |
| | | | | | | 15891 | 15906 | |
| | | | | | | 15949 | 15964 | |
| 548717 | n/a | n/a | ACTAGTTTCCTATAACT | 3-10-4 | 0 | 14738 | 14754 | 1270 |
| | | | | | | 14809 | 14825 | |
| | | | | | | 14880 | 14896 | |
| | | | | | | 14939 | 14955 | |
| | | | | | | 15071 | 15087 | |
| | | | | | | 15214 | 15230 | |
| | | | | | | 15286 | 15302 | |
| | | | | | | 15345 | 15361 | |
| | | | | | | 15477 | 15493 | |
| | | | | | | 15549 | 15565 | |
| | | | | | | 15607 | 15623 | |
| | | | | | | 15679 | 15695 | |
| | | | | | | 15750 | 15766 | |
| | | | | | | 15809 | 15825 | |
| | | | | | | 15881 | 15897 | |
| | | | | | | 15939 | 15955 | |
| 548718 | n/a | n/a | TACTAGTTTCCTATAAC | 3-10-4 | 0 | 14739 | 14755 | 1271 |
| | | | | | | 14810 | 14826 | |
| | | | | | | 14881 | 14897 | |
| | | | | | | 14940 | 14956 | |
| | | | | | | 15000 | 15016 | |
| | | | | | | 15072 | 15088 | |
| | | | | | | 15215 | 15231 | |
| | | | | | | 15287 | 15303 | |
| | | | | | | 15346 | 15362 | |
| | | | | | | 15406 | 15422 | |
| | | | | | | 15478 | 15494 | |
| | | | | | | 15550 | 15566 | |
| | | | | | | 15608 | 15624 | |
| | | | | | | 15680 | 15696 | |
| | | | | | | 15751 | 15767 | |
| | | | | | | 15810 | 15826 | |
| | | | | | | 15882 | 15898 | |
| | | | | | | 15940 | 15956 | |
| 548719 | n/a | n/a | GTACTAGTTTCCTATAA | 3-10-4 | 0 | 14740 | 14756 | 1272 |
| | | | | | | 14811 | 14827 | |
| | | | | | | 14882 | 14898 | |
| | | | | | | 14941 | 14957 | |
| | | | | | | 15001 | 15017 | |
| | | | | | | 15073 | 15089 | |
| | | | | | | 15216 | 15232 | |
| | | | | | | 15288 | 15304 | |
| | | | | | | 15347 | 15363 | |
| | | | | | | 15407 | 15423 | |
| | | | | | | 15479 | 15495 | |
| | | | | | | 15551 | 15567 | |
| | | | | | | 15609 | 15625 | |
| | | | | | | 15681 | 15697 | |
| | | | | | | 15752 | 15768 | |
| | | | | | | 15811 | 15827 | |
| | | | | | | 15883 | 15899 | |
| | | | | | | 15941 | 15957 | |
| 548720 | n/a | n/a | TGTACTAGTTTCCTATA | 3-10-4 | 0 | 14741 | 14757 | 1273 |
| | | | | | | 14812 | 14828 | |
| | | | | | | 14883 | 14899 | |
| | | | | | | 14942 | 14958 | |
| | | | | | | 15002 | 15018 | |
| | | | | | | 15074 | 15090 | |
| | | | | | | 15217 | 15233 | |
| | | | | | | 15289 | 15305 | |
| | | | | | | 15348 | 15364 | |
| | | | | | | 15408 | 15424 | |
| | | | | | | 15480 | 15496 | |
| | | | | | | 15552 | 15568 | |
| | | | | | | 15610 | 15626 | |
| | | | | | | 15682 | 15698 | |
| | | | | | | 15812 | 15828 | |
| | | | | | | 15884 | 15900 | |
| | | | | | | 15942 | 15958 | |
| 548721 | n/a | n/a | CTGTACTAGTTTCCTAT | 3-10-4 | 27 | 14742 | 14758 | 1274 |
| | | | | | | 14813 | 14829 | |
| | | | | | | 14884 | 14900 | |
| | | | | | | 14943 | 14959 | |
| | | | | | | 15003 | 15019 | |
| | | | | | | 15075 | 15091 | |
| | | | | | | 15218 | 15234 | |
| | | | | | | 15290 | 15306 | |
| | | | | | | 15349 | 15365 | |
| | | | | | | 15409 | 15425 | |
| | | | | | | 15481 | 15497 | |
| | | | | | | 15553 | 15569 | |
| | | | | | | 15611 | 15627 | |
| | | | | | | 15683 | 15699 | |
| | | | | | | 15813 | 15829 | |
| | | | | | | 15885 | 15901 | |
| | | | | | | 15943 | 15959 | |
| 548722 | n/a | n/a | ACTGTACTAGTTTCCTA | 3-10-4 | 26 | 14743 | 14759 | 1275 |
| | | | | | | 14814 | 14830 | |
| | | | | | | 14885 | 14901 | |
| | | | | | | 14944 | 14960 | |
| | | | | | | 15004 | 15020 | |
| | | | | | | 15076 | 15092 | |
| | | | | | | 15219 | 15235 | |
| | | | | | | 15291 | 15307 | |
| | | | | | | 15350 | 15366 | |
| | | | | | | 15410 | 15426 | |
| | | | | | | 15482 | 15498 | |
| | | | | | | 15554 | 15570 | |
| | | | | | | 15612 | 15628 | |
| | | | | | | 15684 | 15700 | |
| | | | | | | 15814 | 15830 | |
| | | | | | | 15886 | 15902 | |
| | | | | | | 15944 | 15960 | |
| 548723 | n/a | n/a | CACTGTACTAGTTTCCT | 3-10-4 | 62 | 14744 | 14760 | 1276 |
| | | | | | | 14815 | 14831 | |
| | | | | | | 14886 | 14902 | |
| | | | | | | 14945 | 14961 | |
| | | | | | | 15005 | 15021 | |
| | | | | | | 15077 | 15093 | |
| | | | | | | 15220 | 15236 | |
| | | | | | | 15292 | 15308 | |
| | | | | | | 15351 | 15367 | |
| | | | | | | 15411 | 15427 | |
| | | | | | | 15483 | 15499 | |
| | | | | | | 15555 | 15571 | |
| | | | | | | 15613 | 15629 | |
| | | | | | | 15685 | 15701 | |
| | | | | | | 15815 | 15831 | |
| | | | | | | 15887 | 15903 | |
| | | | | | | 15945 | 15961 | |
| | | | | | | 14745 | 14761 | |
| 548724 | n/a | n/a | TCACTGTACTAGTTTCC | 3-10-4 | 61 | 14816 | 14832 | 1277 |
| | | | | | | 14887 | 14903 | |
| | | | | | | 14946 | 14962 | |
| | | | | | | 15006 | 15022 | |
| | | | | | | 15078 | 15094 | |
| | | | | | | 15221 | 15237 | |
| | | | | | | 15293 | 15309 | |
| | | | | | | 15352 | 15368 | |
| | | | | | | 15412 | 15428 | |
| | | | | | | 15484 | 15500 | |
| | | | | | | 15556 | 15572 | |
| | | | | | | 15614 | 15630 | |
| | | | | | | 15686 | 15702 | |
| | | | | | | 15816 | 15832 | |
| | | | | | | 15888 | 15904 | |
| | | | | | | 15946 | 15962 | |
| 548725 | n/a | n/a | ATCACTGTACTAGTTTC | 3-10-4 | 32 | 14746 | 14762 | 1278 |
| | | | | | | 14817 | 14833 | |
| | | | | | | 14888 | 14904 | |
| | | | | | | 14947 | 14963 | |
| | | | | | | 15007 | 15023 | |
| | | | | | | 15079 | 15095 | |
| | | | | | | 15222 | 15238 | |
| | | | | | | 15294 | 15310 | |
| | | | | | | 15353 | 15369 | |
| | | | | | | 15413 | 15429 | |
| | | | | | | 15485 | 15501 | |
| | | | | | | 15557 | 15573 | |
| | | | | | | 15615 | 15631 | |
| | | | | | | 15687 | 15703 | |
| | | | | | | 15817 | 15833 | |
| | | | | | | 15889 | 15905 | |
| | | | | | | 15947 | 15963 | |
| | | | | | | 14747 | 14763 | |
| 548726 | n/a | n/a | TATCACTGTACTAGTTT | 3-10-4 | 21 | 14818 | 14834 | 1279 |
| | | | | | | 14889 | 14905 | |
| | | | | | | 14948 | 14964 | |
| | | | | | | 15008 | 15024 | |
| | | | | | | 15080 | 15096 | |
| | | | | | | 15152 | 15168 | |
| | | | | | | 15223 | 15239 | |
| | | | | | | 15295 | 15311 | |
| | | | | | | 15354 | 15370 | |
| | | | | | | 15414 | 15430 | |
| | | | | | | 15486 | 15502 | |
| | | | | | | 15558 | 15574 | |
| | | | | | | 15616 | 15632 | |
| | | | | | | 15688 | 15704 | |
| | | | | | | 15818 | 15834 | |
| | | | | | | 15890 | 15906 | |
| | | | | | | 15948 | 15964 | |
| 548727 | n/a | n/a | ACTAGTTTCCTATAACT | 4-10-3 | 0 | 14738 | 14754 | 1270 |
| | | | | | | 14809 | 14825 | |
| | | | | | | 14880 | 14896 | |
| | | | | | | 14939 | 14955 | |
| | | | | | | 15071 | 15087 | |
| | | | | | | 15214 | 15230 | |
| | | | | | | 15286 | 15302 | |
| | | | | | | 15345 | 15361 | |
| | | | | | | 15477 | 15493 | |
| | | | | | | 15549 | 15565 | |
| | | | | | | 15607 | 15623 | |
| | | | | | | 15679 | 15695 | |
| | | | | | | 15750 | 15766 | |
| | | | | | | 15809 | 15825 | |
| | | | | | | 15881 | 15897 | |
| | | | | | | 15939 | 15955 | |
| 548728 | n/a | n/a | TACTAGTTTCCTATAAC | 4-10-3 | 0 | 14739 | 14755 | 1271 |
| | | | | | | 14810 | 14826 | |
| | | | | | | 14881 | 14897 | |
| | | | | | | 14940 | 14956 | |
| | | | | | | 15000 | 15016 | |
| | | | | | | 15072 | 15088 | |
| | | | | | | 15215 | 15231 | |
| | | | | | | 15287 | 15303 | |
| | | | | | | 15346 | 15362 | |
| | | | | | | 15406 | 15422 | |
| | | | | | | 15478 | 15494 | |
| | | | | | | 15550 | 15566 | |
| | | | | | | 15608 | 15624 | |
| | | | | | | 15680 | 15696 | |
| | | | | | | 15751 | 15767 | |
| | | | | | | 15810 | 15826 | |
| | | | | | | 15882 | 15898 | |
| | | | | | | 15940 | 15956 | |
| 548729 | n/a | n/a | GTACTAGTTTCCTATAA | 4-10-3 | 13 | 14740 | 14756 | 1272 |
| | | | | | | 14811 | 14827 | |
| | | | | | | 14882 | 14898 | |
| | | | | | | 14941 | 14957 | |
| | | | | | | 15001 | 15017 | |
| | | | | | | 15073 | 15089 | |
| | | | | | | 15216 | 15232 | |
| | | | | | | 15288 | 15304 | |
| | | | | | | 15347 | 15363 | |
| | | | | | | 15407 | 15423 | |
| | | | | | | 15479 | 15495 | |
| | | | | | | 15551 | 15567 | |
| | | | | | | 15609 | 15625 | |
| | | | | | | 15681 | 15697 | |
| | | | | | | 15752 | 15768 | |
| | | | | | | 15811 | 15827 | |
| | | | | | | 15883 | 15899 | |
| | | | | | | 15941 | 15957 | |
| 548730 | n/a | n/a | TGTACTAGTTTCCTATA | 4-10-3 | 0 | 14741 | 14757 | 1273 |
| | | | | | | 14812 | 14828 | |
| | | | | | | 14883 | 14899 | |
| | | | | | | 14942 | 14958 | |
| | | | | | | 15002 | 15018 | |
| | | | | | | 15074 | 15090 | |
| | | | | | | 15217 | 15233 | |
| | | | | | | 15289 | 15305 | |
| | | | | | | 15348 | 15364 | |
| | | | | | | 15408 | 15424 | |
| | | | | | | 15480 | 15496 | |
| | | | | | | 15552 | 15568 | |
| | | | | | | 15610 | 15626 | |
| | | | | | | 15682 | 15698 | |
| | | | | | | 15812 | 15828 | |
| | | | | | | 15884 | 15900 | |
| | | | | | | 15942 | 15958 | |
| 548731 | n/a | n/a | CTGTACTAGTTTCCTAT | 4-10-3 | 49 | 14742 | 14758 | 1274 |
| | | | | | | 14813 | 14829 | |
| | | | | | | 14884 | 14900 | |
| | | | | | | 14943 | 14959 | |
| | | | | | | 15003 | 15019 | |
| | | | | | | 15075 | 15091 | |
| | | | | | | 15218 | 15234 | |
| | | | | | | 15290 | 15306 | |
| | | | | | | 15349 | 15365 | |
| | | | | | | 15409 | 15425 | |
| | | | | | | 15481 | 15497 | |
| | | | | | | 15553 | 15569 | |
| | | | | | | 15611 | 15627 | |
| | | | | | | 15683 | 15699 | |
| | | | | | | 15813 | 15829 | |
| | | | | | | 15885 | 15901 | |
| | | | | | | 15943 | 15959 | |
| 548732 | n/a | n/a | ACTGTACTAGTTTCCTA | 4-10-3 | 36 | 14743 | 14759 | 1275 |
| | | | | | | 14814 | 14830 | |
| | | | | | | 14885 | 14901 | |
| | | | | | | 14944 | 14960 | |
| | | | | | | 15004 | 15020 | |
| | | | | | | 15076 | 15092 | |
| | | | | | | 15219 | 15235 | |
| | | | | | | 15291 | 15307 | |
| | | | | | | 15350 | 15366 | |
| | | | | | | 15410 | 15426 | |
| | | | | | | 15482 | 15498 | |
| | | | | | | 15554 | 15570 | |
| | | | | | | 15612 | 15628 | |
| | | | | | | 15684 | 15700 | |
| | | | | | | 15814 | 15830 | |
| | | | | | | 15886 | 15902 | |
| | | | | | | 15944 | 15960 | |
| 548733 | n/a | n/a | CACTGTACTAGTTTCCT | 4-10-3 | 84 | 14744 | 14760 | 1276 |
| | | | | | | 14815 | 14831 | |
| | | | | | | 14886 | 14902 | |
| | | | | | | 14945 | 14961 | |
| | | | | | | 15005 | 15021 | |
| | | | | | | 15077 | 15093 | |
| | | | | | | 15220 | 15236 | |
| | | | | | | 15292 | 15308 | |
| | | | | | | 15351 | 15367 | |
| | | | | | | 15411 | 15427 | |
| | | | | | | 15483 | 15499 | |
| | | | | | | 15555 | 15571 | |
| | | | | | | 15613 | 15629 | |
| | | | | | | 15685 | 15701 | |
| | | | | | | 15815 | 15831 | |
| | | | | | | 15887 | 15903 | |
| | | | | | | 15945 | 15961 | |
| 548734 | n/a | n/a | TCACTGTACTAGTTTCC | 4-10-3 | 51 | 14745 | 14761 | 1277 |
| | | | | | | 14816 | 14832 | |
| | | | | | | 14887 | 14903 | |
| | | | | | | 14946 | 14962 | |
| | | | | | | 15006 | 15022 | |
| | | | | | | 15078 | 15094 | |
| | | | | | | 15221 | 15237 | |
| | | | | | | 15293 | 15309 | |
| | | | | | | 15352 | 15368 | |
| | | | | | | 15412 | 15428 | |
| | | | | | | 15484 | 15500 | |
| | | | | | | 15556 | 15572 | |
| | | | | | | 15614 | 15630 | |
| | | | | | | 15686 | 15702 | |
| | | | | | | 15816 | 15832 | |
| | | | | | | 15888 | 15904 | |
| | | | | | | 15946 | 15962 | |
| 548735 | n/a | n/a | ATCACTGTACTAGTTTC | 4-10-3 | 48 | 14746 | 14762 | 1278 |
| | | | | | | 14817 | 14833 | |
| | | | | | | 14888 | 14904 | |
| | | | | | | 14947 | 14963 | |
| | | | | | | 15007 | 15023 | |
| | | | | | | 15079 | 15095 | |
| | | | | | | 15222 | 15238 | |
| | | | | | | 15294 | 15310 | |
| | | | | | | 15353 | 15369 | |
| | | | | | | 15413 | 15429 | |
| | | | | | | 15485 | 15501 | |
| | | | | | | 15557 | 15573 | |
| | | | | | | 15615 | 15631 | |
| | | | | | | 15687 | 15703 | |
| | | | | | | 15817 | 15833 | |
| | | | | | | 15889 | 15905 | |
| | | | | | | 15947 | 15963 | |
| 548736 | n/a | n/a | TATCACTGTACTAGTTT | 4-10-3 | 21 | 14747 | 14763 | 1279 |
| | | | | | | 14818 | 14834 | |
| | | | | | | 14889 | 14905 | |
| | | | | | | 14948 | 14964 | |
| | | | | | | 15008 | 15024 | |
| | | | | | | 15080 | 15096 | |
| | | | | | | 15152 | 15168 | |
| | | | | | | 15223 | 15239 | |
| | | | | | | 15295 | 15311 | |
| | | | | | | 15354 | 15370 | |
| | | | | | | 15414 | 15430 | |
| | | | | | | 15486 | 15502 | |
| | | | | | | 15558 | 15574 | |
| | | | | | | 15616 | 15632 | |
| | | | | | | 15688 | 15704 | |
| | | | | | | 15818 | 15834 | |
| | | | | | | 15890 | 15906 | |
| | | | | | | 15948 | 15964 | |
| 548737 | n/a | n/a | ACTAGTTTCCTATAACT | 4-9-4 | 11 | 14738 | 14754 | 1270 |
| | | | | | | 14809 | 14825 | |
| | | | | | | 14880 | 14896 | |
| | | | | | | 14939 | 14955 | |
| | | | | | | 15071 | 15087 | |
| | | | | | | 15214 | 15230 | |
| | | | | | | 15286 | 15302 | |
| | | | | | | 15345 | 15361 | |
| | | | | | | 15477 | 15493 | |
| | | | | | | 15549 | 15565 | |
| | | | | | | 15607 | 15623 | |
| | | | | | | 15679 | 15695 | |
| | | | | | | 15750 | 15766 | |
| | | | | | | 15809 | 15825 | |
| | | | | | | 15881 | 15897 | |
| | | | | | | 15939 | 15955 | |
| 548738 | n/a | n/a | TACTAGTTTCCTATAAC | 4-9-4 | 0 | 14739 | 14755 | 1271 |
| | | | | | | 14810 | 14826 | |
| | | | | | | 14881 | 14897 | |
| | | | | | | 14940 | 14956 | |
| | | | | | | 15000 | 15016 | |
| | | | | | | 15072 | 15088 | |
| | | | | | | 15215 | 15231 | |
| | | | | | | 15287 | 15303 | |
| | | | | | | 15346 | 15362 | |
| | | | | | | 15406 | 15422 | |
| | | | | | | 15478 | 15494 | |
| | | | | | | 15550 | 15566 | |
| | | | | | | 15608 | 15624 | |
| | | | | | | 15680 | 15696 | |
| | | | | | | 15751 | 15767 | |
| | | | | | | 15810 | 15826 | |
| | | | | | | 15882 | 15898 | |
| | | | | | | 15940 | 15956 | |
| 548739 | n/a | n/a | GTACTAGTTTCCTATAA | 4-9-4 | 0 | 14740 | 14756 | 1272 |
| | | | | | | 14811 | 14827 | |
| | | | | | | 14882 | 14898 | |
| | | | | | | 14941 | 14957 | |
| | | | | | | 15001 | 15017 | |
| | | | | | | 15073 | 15089 | |
| | | | | | | 15216 | 15232 | |
| | | | | | | 15288 | 15304 | |
| | | | | | | 15347 | 15363 | |
| | | | | | | 15407 | 15423 | |
| | | | | | | 15479 | 15495 | |
| | | | | | | 15551 | 15567 | |
| | | | | | | 15609 | 15625 | |
| | | | | | | 15681 | 15697 | |
| | | | | | | 15752 | 15768 | |
| | | | | | | 15811 | 15827 | |
| | | | | | | 15883 | 15899 | |
| | | | | | | 15941 | 15957 | |
| 548740 | n/a | n/a | TGTACTAGTTTCCTATA | 4-9-4 | 0 | 14741 | 14757 | 1273 |
| | | | | | | 14812 | 14828 | |
| | | | | | | 14883 | 14899 | |
| | | | | | | 14942 | 14958 | |
| | | | | | | 15002 | 15018 | |
| | | | | | | 15074 | 15090 | |
| | | | | | | 15217 | 15233 | |
| | | | | | | 15289 | 15305 | |
| | | | | | | 15348 | 15364 | |
| | | | | | | 15408 | 15424 | |
| | | | | | | 15480 | 15496 | |
| | | | | | | 15552 | 15568 | |
| | | | | | | 15610 | 15626 | |
| | | | | | | 15682 | 15698 | |
| | | | | | | 15812 | 15828 | |
| | | | | | | 15884 | 15900 | |
| | | | | | | 15942 | 15958 | |
| 548741 | n/a | n/a | CTGTACTAGTTTCCTAT | 4-9-4 | 69 | 14742 | 14758 | 1274 |
| | | | | | | 14813 | 14829 | |
| | | | | | | 14884 | 14900 | |
| | | | | | | 14943 | 14959 | |
| | | | | | | 15003 | 15019 | |
| | | | | | | 15075 | 15091 | |
| | | | | | | 15218 | 15234 | |
| | | | | | | 15290 | 15306 | |
| | | | | | | 15349 | 15365 | |
| | | | | | | 15409 | 15425 | |
| | | | | | | 15481 | 15497 | |
| | | | | | | 15553 | 15569 | |
| | | | | | | 15611 | 15627 | |
| | | | | | | 15683 | 15699 | |
| | | | | | | 15813 | 15829 | |
| | | | | | | 15885 | 15901 | |
| | | | | | | 15943 | 15959 | |
| 548742 | n/a | n/a | ACTGTACTAGTTTCCTA | 4-9-4 | 50 | 14743 | 14759 | 1275 |
| | | | | | | 14814 | 14830 | |
| | | | | | | 14885 | 14901 | |
| | | | | | | 14944 | 14960 | |
| | | | | | | 15004 | 15020 | |
| | | | | | | 15076 | 15092 | |
| | | | | | | 15219 | 15235 | |
| | | | | | | 15291 | 15307 | |
| | | | | | | 15350 | 15366 | |
| | | | | | | 15410 | 15426 | |
| | | | | | | 15482 | 15498 | |
| | | | | | | 15554 | 15570 | |
| | | | | | | 15612 | 15628 | |
| | | | | | | 15684 | 15700 | |
| | | | | | | 15814 | 15830 | |
| | | | | | | 15886 | 15902 | |
| | | | | | | 15944 | 15960 | |
| 548743 | n/a | n/a | CACTGTACTAGTTTCCT | 4-9-4 | 80 | 14744 | 14760 | 1276 |
| | | | | | | 14815 | 14831 | |
| | | | | | | 14886 | 14902 | |
| | | | | | | 14945 | 14961 | |
| | | | | | | 15005 | 15021 | |
| | | | | | | 15077 | 15093 | |
| | | | | | | 15220 | 15236 | |
| | | | | | | 15292 | 15308 | |
| | | | | | | 15351 | 15367 | |
| | | | | | | 15411 | 15427 | |
| | | | | | | 15483 | 15499 | |
| | | | | | | 15555 | 15571 | |
| | | | | | | 15613 | 15629 | |
| | | | | | | 15685 | 15701 | |
| | | | | | | 15815 | 15831 | |
| | | | | | | 15887 | 15903 | |
| | | | | | | 15945 | 15961 | |
| 548744 | n/a | n/a | TCACTGTACTAGTTTCC | 4-9-4 | 83 | 14745 | 14761 | 1277 |
| | | | | | | 14816 | 14832 | |
| | | | | | | 14887 | 14903 | |
| | | | | | | 14946 | 14962 | |
| | | | | | | 15006 | 15022 | |
| | | | | | | 15078 | 15094 | |
| | | | | | | 15221 | 15237 | |
| | | | | | | 15293 | 15309 | |
| | | | | | | 15352 | 15368 | |
| | | | | | | 15412 | 15428 | |
| | | | | | | 15484 | 15500 | |
| | | | | | | 15556 | 15572 | |
| | | | | | | 15614 | 15630 | |
| | | | | | | 15686 | 15702 | |
| | | | | | | 15816 | 15832 | |
| | | | | | | 15888 | 15904 | |
| | | | | | | 15946 | 15962 | |
| 548745 | n/a | n/a | ATCACTGTACTAGTTTC | 4-9-4 | 71 | 14746 | 14762 | 1278 |
| | | | | | | 14817 | 14833 | |
| | | | | | | 14888 | 14904 | |
| | | | | | | 14947 | 14963 | |
| | | | | | | 15007 | 15023 | |
| | | | | | | 15079 | 15095 | |
| | | | | | | 15222 | 15238 | |
| | | | | | | 15294 | 15310 | |
| | | | | | | 15353 | 15369 | |
| | | | | | | 15413 | 15429 | |
| | | | | | | 15485 | 15501 | |
| | | | | | | 15557 | 15573 | |
| | | | | | | 15615 | 15631 | |
| | | | | | | 15687 | 15703 | |
| | | | | | | 15817 | 15833 | |
| | | | | | | 15889 | 15905 | |
| | | | | | | 15947 | 15963 | |
| 548746 | n/a | n/a | TATCACTGTACTAGTTT | 4-9-4 | 40 | 14747 | 14763 | 1279 |
| | | | | | | 14818 | 14834 | |
| | | | | | | 14889 | 14905 | |
| | | | | | | 14948 | 14964 | |
| | | | | | | 15008 | 15024 | |
| | | | | | | 15080 | 15096 | |
| | | | | | | 15152 | 15168 | |
| | | | | | | 15223 | 15239 | |
| | | | | | | 15295 | 15311 | |
| | | | | | | 15354 | 15370 | |
| | | | | | | 15414 | 15430 | |
| | | | | | | 15486 | 15502 | |
| | | | | | | 15558 | 15574 | |
| | | | | | | 15616 | 15632 | |
| | | | | | | 15688 | 15704 | |
| | | | | | | 15818 | 15834 | |
| | | | | | | 15890 | 15906 | |
| | | | | | | 15948 | 15964 | |
| 548747 | n/a | n/a | TACTAGTTTCCTATAACT | 4-10-4 | 2 | 14738 | 14755 | 1280 |
| | | | | | | 14809 | 14826 | |
| | | | | | | 14880 | 14897 | |
| | | | | | | 14939 | 14956 | |
| | | | | | | 15071 | 15088 | |
| | | | | | | 15214 | 15231 | |
| | | | | | | 15286 | 15303 | |
| | | | | | | 15345 | 15362 | |
| | | | | | | 15477 | 15494 | |
| | | | | | | 15549 | 15566 | |
| | | | | | | 15607 | 15624 | |
| | | | | | | 15679 | 15696 | |
| | | | | | | 15750 | 15767 | |
| | | | | | | 15809 | 15826 | |
| | | | | | | 15881 | 15898 | |
| | | | | | | 15939 | 15956 | |
| 548748 | n/a | n/a | GTACTAGTTTCCTATAAC | 4-10-4 | 0 | 14739 | 14756 | 1281 |
| | | | | | | 14810 | 14827 | |
| | | | | | | 14881 | 14898 | |
| | | | | | | 14940 | 14957 | |
| | | | | | | 15000 | 15017 | |
| | | | | | | 15072 | 15089 | |
| | | | | | | 15215 | 15232 | |
| | | | | | | 15287 | 15304 | |
| | | | | | | 15346 | 15363 | |
| | | | | | | 15406 | 15423 | |
| | | | | | | 15478 | 15495 | |
| | | | | | | 15550 | 15567 | |
| | | | | | | 15608 | 15625 | |
| | | | | | | 15680 | 15697 | |
| | | | | | | 15751 | 15768 | |
| | | | | | | 15810 | 15827 | |
| | | | | | | 15882 | 15899 | |
| | | | | | | 15940 | 15957 | |
| 548749 | n/a | n/a | TGTACTAGTTTCCTATAA | 4-10-4 | 0 | 14740 | 14757 | 1282 |
| | | | | | | 14811 | 14828 | |
| | | | | | | 14882 | 14899 | |
| | | | | | | 14941 | 14958 | |
| | | | | | | 15001 | 15018 | |
| | | | | | | 15073 | 15090 | |
| | | | | | | 15216 | 15233 | |
| | | | | | | 15288 | 15305 | |
| | | | | | | 15347 | 15364 | |
| | | | | | | 15407 | 15424 | |
| | | | | | | 15479 | 15496 | |
| | | | | | | 15551 | 15568 | |
| | | | | | | 15609 | 15626 | |
| | | | | | | 15681 | 15698 | |
| | | | | | | 15811 | 15828 | |
| | | | | | | 15883 | 15900 | |
| | | | | | | 15941 | 15958 | |
| 548750 | n/a | n/a | CTGTACTAGTTTCCTATA | 4-10-4 | 62 | 14741 | 14758 | 1283 |
| | | | | | | 14812 | 14829 | |
| | | | | | | 14883 | 14900 | |
| | | | | | | 14942 | 14959 | |
| | | | | | | 15002 | 15019 | |
| | | | | | | 15074 | 15091 | |
| | | | | | | 15217 | 15234 | |
| | | | | | | 15289 | 15306 | |
| | | | | | | 15348 | 15365 | |
| | | | | | | 15408 | 15425 | |
| | | | | | | 15480 | 15497 | |
| | | | | | | 15552 | 15569 | |
| | | | | | | 15610 | 15627 | |
| | | | | | | 15682 | 15699 | |
| | | | | | | 15812 | 15829 | |
| | | | | | | 15884 | 15901 | |
| | | | | | | 15942 | 15959 | |
| 548751 | n/a | n/a | ACTGTACTAGTTTCCTAT | 4-10-4 | 53 | 14742 | 14759 | 1284 |
| | | | | | | 14813 | 14830 | |
| | | | | | | 14884 | 14901 | |
| | | | | | | 14943 | 14960 | |
| | | | | | | 15003 | 15020 | |
| | | | | | | 15075 | 15092 | |
| | | | | | | 15218 | 15235 | |
| | | | | | | 15290 | 15307 | |
| | | | | | | 15349 | 15366 | |
| | | | | | | 15409 | 15426 | |
| | | | | | | 15481 | 15498 | |
| | | | | | | 15553 | 15570 | |
| | | | | | | 15611 | 15628 | |
| | | | | | | 15683 | 15700 | |
| | | | | | | 15813 | 15830 | |
| | | | | | | 15885 | 15902 | |
| | | | | | | 15943 | 15960 | |
| 548752 | n/a | n/a | CACTGTACTAGTTTCCTA | 4-10-4 | 89 | 14743 | 14760 | 1285 |
| | | | | | | 14814 | 14831 | |
| | | | | | | 14885 | 14902 | |
| | | | | | | 14944 | 14961 | |
| | | | | | | 15004 | 15021 | |
| | | | | | | 15076 | 15093 | |
| | | | | | | 15219 | 15236 | |
| | | | | | | 15291 | 15308 | |
| | | | | | | 15350 | 15367 | |
| | | | | | | 15410 | 15427 | |
| | | | | | | 15482 | 15499 | |
| | | | | | | 15554 | 15571 | |
| | | | | | | 15612 | 15629 | |
| | | | | | | 15684 | 15701 | |
| | | | | | | 15814 | 15831 | |
| | | | | | | 15886 | 15903 | |
| | | | | | | 15944 | 15961 | |
| 548753 | n/a | n/a | TCACTGTACTAGTTTCCT | 4-10-4 | 82 | 14744 | 14761 | 1286 |
| | | | | | | 14815 | 14832 | |
| | | | | | | 14886 | 14903 | |
| | | | | | | 14945 | 14962 | |
| | | | | | | 15005 | 15022 | |
| | | | | | | 15077 | 15094 | |
| | | | | | | 15220 | 15237 | |
| | | | | | | 15292 | 15309 | |
| | | | | | | 15351 | 15368 | |
| | | | | | | 15411 | 15428 | |
| | | | | | | 15483 | 15500 | |
| | | | | | | 15555 | 15572 | |
| | | | | | | 15613 | 15630 | |
| | | | | | | 15685 | 15702 | |
| | | | | | | 15815 | 15832 | |
| | | | | | | 15887 | 15904 | |
| | | | | | | 15945 | 15962 | |
| 548754 | n/a | n/a | ATCACTGTACTAGTTTCC | 4-10-4 | 77 | 14745 | 14762 | 1287 |
| | | | | | | 14816 | 14833 | |
| | | | | | | 14887 | 14904 | |
| | | | | | | 14946 | 14963 | |
| | | | | | | 15006 | 15023 | |
| | | | | | | 15078 | 15095 | |
| | | | | | | 15221 | 15238 | |
| | | | | | | 15293 | 15310 | |
| | | | | | | 15352 | 15369 | |
| | | | | | | 15412 | 15429 | |
| | | | | | | 15484 | 15501 | |
| | | | | | | 15556 | 15573 | |
| | | | | | | 15614 | 15631 | |
| | | | | | | 15686 | 15703 | |
| | | | | | | 15816 | 15833 | |
| | | | | | | 15888 | 15905 | |
| | | | | | | 15946 | 15963 | |
| 548755 | n/a | n/a | TATCACTGTACTAGTTTC | 4-10-4 | 20 | 14746 | 14763 | 1288 |
| | | | | | | 14817 | 14834 | |
| | | | | | | 14888 | 14905 | |
| | | | | | | 14947 | 14964 | |
| | | | | | | 15007 | 15024 | |
| | | | | | | 15079 | 15096 | |
| | | | | | | 15222 | 15239 | |
| | | | | | | 15294 | 15311 | |
| | | | | | | 15353 | 15370 | |
| | | | | | | 15413 | 15430 | |
| | | | | | | 15485 | 15502 | |
| | | | | | | 15557 | 15574 | |
| | | | | | | 15615 | 15632 | |
| | | | | | | 15687 | 15704 | |
| | | | | | | 15817 | 15834 | |
| | | | | | | 15889 | 15906 | |
| | | | | | | 15947 | 15964 | |
| 548756 | n/a | n/a | GTATCACTGTACTAGTT | 4-9-4 | 81 | 14748 | 14764 | 1289 |
| | | | | | | 14819 | 14835 | |
| | | | | | | 14890 | 14906 | |
| | | | | | | 14949 | 14965 | |
| | | | | | | 15009 | 15025 | |
| | | | | | | 15081 | 15097 | |
| | | | | | | 15153 | 15169 | |
| | | | | | | 15224 | 15240 | |
| | | | | | | 15296 | 15312 | |
| | | | | | | 15355 | 15371 | |
| | | | | | | 15415 | 15431 | |
| | | | | | | 15487 | 15503 | |
| | | | | | | 15559 | 15575 | |
| | | | | | | 15617 | 15633 | |
| | | | | | | 15689 | 15705 | |
| | | | | | | 15819 | 15835 | |
| | | | | | | 15891 | 15907 | |
| | | | | | | 15949 | 15965 | |
| 548757 | n/a | n/a | AGTATCACTGTACTAGT | 4-9-4 | 87 | 14749 | 14765 | 1290 |
| | | | | | | 14820 | 14836 | |
| | | | | | | 14891 | 14907 | |
| | | | | | | 14950 | 14966 | |
| | | | | | | 15010 | 15026 | |
| | | | | | | 15082 | 15098 | |
| | | | | | | 15154 | 15170 | |
| | | | | | | 15225 | 15241 | |
| | | | | | | 15297 | 15313 | |
| | | | | | | 15356 | 15372 | |
| | | | | | | 15416 | 15432 | |
| | | | | | | 15488 | 15504 | |
| | | | | | | 15560 | 15576 | |
| | | | | | | 15618 | 15634 | |
| | | | | | | 15690 | 15706 | |
| | | | | | | 15820 | 15836 | |
| | | | | | | 15892 | 15908 | |
| | | | | | | 15950 | 15966 | |
| 548758 | n/a | n/a | CAGTATCACTGTACTAG | 4-9-4 | 97 | 14750 | 14766 | 1291 |
| | | | | | | 14821 | 14837 | |
| | | | | | | 14892 | 14908 | |
| | | | | | | 14951 | 14967 | |
| | | | | | | 15011 | 15027 | |
| | | | | | | 15083 | 15099 | |
| | | | | | | 15155 | 15171 | |
| | | | | | | 15226 | 15242 | |
| | | | | | | 15298 | 15314 | |
| | | | | | | 15357 | 15373 | |
| | | | | | | 15417 | 15433 | |
| | | | | | | 15489 | 15505 | |
| | | | | | | 15561 | 15577 | |
| | | | | | | 15619 | 15635 | |
| | | | | | | 15691 | 15707 | |
| | | | | | | 15821 | 15837 | |
| | | | | | | 15893 | 15909 | |
| | | | | | | 15951 | 15967 | |
| 548759 | n/a | n/a | AACAGTATCACTGTACT | 4-9-4 | 68 | 14752 | 14768 | 1292 |
| | | | | | | 14823 | 14839 | |
| | | | | | | 14894 | 14910 | |
| | | | | | | 14953 | 14969 | |
| | | | | | | 15013 | 15029 | |
| | | | | | | 15085 | 15101 | |
| | | | | | | 15157 | 15173 | |
| | | | | | | 15228 | 15244 | |
| | | | | | | 15300 | 15316 | |
| | | | | | | 15359 | 15375 | |
| | | | | | | 15419 | 15435 | |
| | | | | | | 15491 | 15507 | |
| | | | | | | 15563 | 15579 | |
| | | | | | | 15621 | 15637 | |
| | | | | | | 15693 | 15709 | |
| | | | | | | 15823 | 15839 | |
| | | | | | | 15895 | 15911 | |
| | | | | | | 15953 | 15969 | |
| 548760 | n/a | n/a | TAACAGTATCACTGTAC | 4-9-4 | 53 | 14753 | 14769 | 1293 |
| | | | | | | 14824 | 14840 | |
| | | | | | | 14895 | 14911 | |
| | | | | | | 14954 | 14970 | |
| | | | | | | 15014 | 15030 | |
| | | | | | | 15086 | 15102 | |
| | | | | | | 15158 | 15174 | |
| | | | | | | 15229 | 15245 | |
| | | | | | | 15301 | 15317 | |
| | | | | | | 15360 | 15376 | |
| | | | | | | 15420 | 15436 | |
| | | | | | | 15492 | 15508 | |
| | | | | | | 15564 | 15580 | |
| | | | | | | 15622 | 15638 | |
| | | | | | | 15694 | 15710 | |
| | | | | | | 15824 | 15840 | |
| | | | | | | 15896 | 15912 | |
| | | | | | | 15954 | 15970 | |
| 548761 | n/a | n/a | CTAACAGTATCACTGTA | 4-9-4 | 49 | 14754 | 14770 | 1294 |
| | | | | | | 14825 | 14841 | |
| | | | | | | 14896 | 14912 | |
| | | | | | | 15015 | 15031 | |
| | | | | | | 15087 | 15103 | |
| | | | | | | 15230 | 15246 | |
| | | | | | | 15302 | 15318 | |
| | | | | | | 15421 | 15437 | |
| | | | | | | 15493 | 15509 | |
| | | | | | | 15623 | 15639 | |
| | | | | | | 15825 | 15841 | |
| | | | | | | 15955 | 15971 | |
| 548762 | n/a | n/a | TCTAACAGTATCACTGT | 4-9-4 | 16 | 14755 | 14771 | 1295 |
| | | | | | | 14826 | 14842 | |
| | | | | | | 14897 | 14913 | |
| | | | | | | 15016 | 15032 | |
| | | | | | | 15088 | 15104 | |
| | | | | | | 15231 | 15247 | |
| | | | | | | 15303 | 15319 | |
| | | | | | | 15422 | 15438 | |
| | | | | | | 15494 | 15510 | |
| | | | | | | 15624 | 15640 | |
| | | | | | | 15826 | 15842 | |
| | | | | | | 15956 | 15972 | |
| 548763 | n/a | n/a | CTCTAACAGTATCACTG | 4-9-4 | 44 | 14756 | 14772 | 1296 |
| | | | | | | 14827 | 14843 | |
| | | | | | | 14898 | 14914 | |
| | | | | | | 15017 | 15033 | |
| | | | | | | 15089 | 15105 | |
| | | | | | | 15232 | 15248 | |
| | | | | | | 15304 | 15320 | |
| | | | | | | 15423 | 15439 | |
| | | | | | | 15495 | 15511 | |
| | | | | | | 15625 | 15641 | |
| | | | | | | 15827 | 15843 | |
| | | | | | | 15957 | 15973 | |
| 548764 | n/a | n/a | TATCACTGTCCTATAAC | 4-9-4 | 31 | 14772 | 14788 | 1297 |
| | | | | | | 14843 | 14859 | |
| | | | | | | 15177 | 15193 | |
| | | | | | | 15583 | 15599 | |
| | | | | | | 15713 | 15729 | |
| | | | | | | 16012 | 16028 | |
| | | | | | | 16083 | 16099 | |
| | | | | | | 16161 | 16177 | |
| | | | | | | 16180 | 16196 | |
| | | | | | | 16231 | 16247 | |
| 548765 | n/a | n/a | ATATCACTGTCCTATAA | 4-9-4 | 0 | 14773 | 14789 | 1298 |
| | | | | | | 14844 | 14860 | |
| | | | | | | 15178 | 15194 | |
| | | | | | | 15584 | 15600 | |
| | | | | | | 15714 | 15730 | |
| | | | | | | 16013 | 16029 | |
| | | | | | | 16084 | 16100 | |
| | | | | | | 16162 | 16178 | |
| | | | | | | 16181 | 16197 | |
| | | | | | | 16232 | 16248 | |
| 548766 | n/a | n/a | TATATCACTGTCCTATA | 4-9-4 | 36 | 14774 | 14790 | 1299 |
| | | | | | | 14845 | 14861 | |
| | | | | | | 15179 | 15195 | |
| | | | | | | 15715 | 15731 | |
| | | | | | | 16163 | 16179 | |
| 548767 | n/a | n/a | TATCACTGTCCTATATC | 4-9-4 | 59 | 14785 | 14801 | 1300 |
| | | | | | | 14856 | 14872 | |
| | | | | | | 14981 | 14997 | |
| | | | | | | 15119 | 15135 | |
| | | | | | | 15190 | 15206 | |
| | | | | | | 15262 | 15278 | |
| | | | | | | 15387 | 15403 | |
| | | | | | | 15525 | 15541 | |
| | | | | | | 15655 | 15671 | |
| | | | | | | 15726 | 15742 | |
| | | | | | | 15857 | 15873 | |
| | | | | | | 15987 | 16003 | |
| 548768 | n/a | n/a | GTATCACTGTCCTATAT | 4-9-4 | 56 | 14786 | 14802 | 1301 |
| | | | | | | 14982 | 14998 | |
| | | | | | | 15120 | 15136 | |
| | | | | | | 15388 | 15404 | |
| | | | | | | 15526 | 15542 | |
| | | | | | | 15988 | 16004 | |
| 548769 | n/a | n/a | AGTATCACTGTCCTATA | 4-9-4 | 64 | 14787 | 14803 | 1302 |
| | | | | | | 14983 | 14999 | |
| | | | | | | 15121 | 15137 | |
| | | | | | | 15389 | 15405 | |
| | | | | | | 15527 | 15543 | |
| | | | | | | 15989 | 16005 | |
| 548770 | n/a | n/a | TAACAGTATCACTGTCC | 4-9-4 | 92 | 14791 | 14807 | 1303 |
| | | | | | | 14987 | 15003 | |
| | | | | | | 15053 | 15069 | |
| | | | | | | 15125 | 15141 | |
| | | | | | | 15393 | 15409 | |
| | | | | | | 15459 | 15475 | |
| | | | | | | 15531 | 15547 | |
| | | | | | | 15993 | 16009 | |
| 548771 | n/a | n/a | ATAACAGTATCACTGTC | 4-9-4 | 62 | 14792 | 14808 | 1304 |
| | | | | | | 14988 | 15004 | |
| | | | | | | 15054 | 15070 | |
| | | | | | | 15126 | 15142 | |
| | | | | | | 15394 | 15410 | |
| | | | | | | 15460 | 15476 | |
| | | | | | | 15532 | 15548 | |
| | | | | | | 15994 | 16010 | |
| 548772 | n/a | n/a | TATAACAGTATCACTGT | 4-9-4 | 0 | 14793 | 14809 | 1305 |
| | | | | | | 14989 | 15005 | |
| | | | | | | 15055 | 15071 | |
| | | | | | | 15127 | 15143 | |
| | | | | | | 15160 | 15176 | |
| | | | | | | 15362 | 15378 | |
| | | | | | | 15395 | 15411 | |
| | | | | | | 15461 | 15477 | |
| | | | | | | 15533 | 15549 | |
| | | | | | | 15566 | 15582 | |
| | | | | | | 15696 | 15712 | |
| | | | | | | 15898 | 15914 | |
| | | | | | | 15995 | 16011 | |
| 548773 | n/a | n/a | CTATAACAGTATCACTG | 4-9-4 | 0 | 14794 | 14810 | 1306 |
| | | | | | | 14990 | 15006 | |
| | | | | | | 15056 | 15072 | |
| | | | | | | 15128 | 15144 | |
| | | | | | | 15161 | 15177 | |
| | | | | | | 15363 | 15379 | |
| | | | | | | 15396 | 15412 | |
| | | | | | | 15462 | 15478 | |
| | | | | | | 15534 | 15550 | |
| | | | | | | 15567 | 15583 | |
| | | | | | | 15697 | 15713 | |
| | | | | | | 15899 | 15915 | |
| | | | | | | 15996 | 16012 | |
| 548774 | n/a | n/a | CCTATAACTATAACAGT | 4-9-4 | 0 | 14801 | 14817 | 1307 |
| | | | | | | 15063 | 15079 | |
| | | | | | | 15168 | 15184 | |
| | | | | | | 15469 | 15485 | |
| | | | | | | 15541 | 15557 | |
| | | | | | | 15574 | 15590 | |
| | | | | | | 15704 | 15720 | |
| | | | | | | 15775 | 15791 | |
| | | | | | | 16003 | 16019 | |
| 548775 | n/a | n/a | TCCTATAACTATAACAG | 4-9-4 | 0 | 14802 | 14818 | 1308 |
| | | | | | | 15064 | 15080 | |
| | | | | | | 15169 | 15185 | |
| | | | | | | 15470 | 15486 | |
| | | | | | | 15542 | 15558 | |
| | | | | | | 15575 | 15591 | |
| | | | | | | 15705 | 15721 | |
| | | | | | | 16004 | 16020 | |
| 548776 | n/a | n/a | CCTATAACTATAACAAT | 4-9-4 | 0 | 14872 | 14888 | 1309 |
| | | | | | | 14931 | 14947 | |
| | | | | | | 15206 | 15222 | |
| | | | | | | 15278 | 15294 | |
| | | | | | | 15337 | 15353 | |
| | | | | | | 15599 | 15615 | |
| | | | | | | 15671 | 15687 | |
| | | | | | | 15742 | 15758 | |
| | | | | | | 15801 | 15817 | |
| | | | | | | 15873 | 15889 | |
| | | | | | | 15931 | 15947 | |
| | | | | | | 16074 | 16090 | |
| | | | | | | 16099 | 16115 | |
| | | | | | | 16152 | 16168 | |
| | | | | | | 16247 | 16263 | |
| 548777 | n/a | n/a | GTAACAGTATCACTGTA | 4-9-4 | 41 | 14955 | 14971 | 1310 |
| 548778 | n/a | n/a | ATAACAGTATCACTGTA | 4-9-4 | 20 | 15159 | 15175 | 1311 |
| | | | | | | 15361 | 15377 | |
| | | | | | | 15565 | 15581 | |
| | | | | | | 15695 | 15711 | |
| | | | | | | 15897 | 15913 | |
| 548779 | n/a | n/a | GTCCTATAACTATAACA | 4-9-4 | 0 | 15170 | 15186 | 1312 |
| | | | | | | 15576 | 15592 | |
| | | | | | | 15706 | 15722 | |
| | | | | | | 16005 | 16021 | |
| | | | | | | 16076 | 16092 | |
| | | | | | | 16101 | 16117 | |
| | | | | | | 16154 | 16170 | |
| 548780 | n/a | n/a | TGTCCTATAACTATAAC | 4-9-4 | 22 | 15171 | 15187 | 1313 |
| | | | | | | 15577 | 15593 | |
| | | | | | | 15707 | 15723 | |
| | | | | | | 16006 | 16022 | |
| | | | | | | 16077 | 16093 | |
| | | | | | | 16102 | 16118 | |
| | | | | | | 16155 | 16171 | |
| 548781 | n/a | n/a | ACCTATAACTATAACAG | 4-9-4 | 0 | 15776 | 15792 | 1314 |
| 548782 | n/a | n/a | TACCTATAACTATAACA | 4-9-4 | 0 | 15777 | 15793 | 1315 |
| | | | | | | 16249 | 16265 | |
| 548783 | n/a | n/a | ACCTATAACTATAACAA | 4-9-4 | 0 | 16248 | 16264 | 1316 |

### Example 116: Antisense Inhibition of Human PKK in HepaRG™ Cells by Antisense Oligonucleotides with MOE, Deoxy and cEt Sugar Modifications

[1078] Additional antisense oligonucleotides were designed targeting a PKK nucleic acid and were tested for their effects on PKK mRNA in vitro.

[1079] The chimeric antisense oligonucleotides in the tables below were designed as deoxy, MOE and cEt gapmers. The gapmers are 16 nucleosides in length wherein the nucleoside have either a MOE sugar modification, a cEt sugar modification, or a deoxy modification. The ‘Chemistry’ column describes the sugar modifications of each oligonucleotide. ‘k’ indicates an cEt sugar modification; the number indicates the number of deoxynucleosides; otherwise, ‘d’ indicates a deoxynucleoside; and ‘e’ indicates a 2′-O-methoxyethyl modification. The internucleoside linkages throughout each gapmer are phosphorothioate linkages. All cytosine residues throughout each oligonucleotide are 5-methylcytosines. “Start site” indicates the 5′-most nucleoside to which the gapmer is targeted in the human gene sequence. “Stop site” indicates the 3′-most nucleoside to which the gapmer is targeted in the human gene sequence. Each gapmer listed in the tables below is targeted to either the human PKK mRNA, designated herein as SEQ ID NO: 1 or the human PKK genomic sequence, designated herein as SEQ ID NO: 10. ‘n/a’ indicates that the antisense oligonucleotide does not target that particular gene sequence.

[1080] Cultured HepaRG™ cells at a density of 20,000 cells per well were transfected using electroporation with 1,000 nM antisense oligonucleotide. After a treatment period of approximately 24 hours, RNA was isolated from the cells and PKK mRNA levels were measured by quantitative real-time PCR. Human primer probe set RTS3454 was used to measure mRNA levels. ISIS 531231 was also included in this assay. PKK mRNA levels were adjusted according to total RNA content, as measured by RIBOGREEN®. The antisense oligonucleotides were tested in a series of experiments that had similar culture conditions. The results for each experiment are presented in separate tables shown below. Results are presented as percent inhibition of PKK relative to untreated control cells.

TABLE 140

| | SEQ | SEQ | | | | SEQ | SEQ | |
|---|---|---|---|---|---|---|---|---|
| | ID | ID | | | | ID | ID | |
| | NO: | NO: | | | | NO: | NO: | |
| | 1 | 1 | | | | 10 | 10 | SEQ |
| ISIS | Start | Stop | | | % | Start | Stop | ID |
| NO | Site | Site | Sequence | Chemistry | inhibition | Site | Site | NO |
| 547747 | n/a | n/a | TCACTGTACTAGTTTC | eekd₁₀kke | 95 | 14746 | 14761 | 1267 |
| | | | | | | 14817 | 14832 | |
| | | | | | | 14888 | 14903 | |
| | | | | | | 14947 | 14962 | |
| | | | | | | 15007 | 15022 | |
| | | | | | | 15079 | 15094 | |
| | | | | | | 15222 | 15237 | |
| | | | | | | 15294 | 15309 | |
| | | | | | | 15353 | 15368 | |
| | | | | | | 15413 | 15428 | |
| | | | | | | 15485 | 15500 | |
| | | | | | | 15557 | 15572 | |
| | | | | | | 15615 | 15630 | |
| | | | | | | 15687 | 15702 | |
| | | | | | | 15817 | 15832 | |
| | | | | | | 15889 | 15904 | |
| | | | | | | 15947 | 15962 | |
| 548074 | 1642 | 1657 | CCTTTCTCCTTCGAGA | eekd₁₀kke | 0 | 31948 | 31963 | 1317 |
| 548075 | 1643 | 1658 | ACCTTTCTCCTTCGAG | eekd₁₀kke | 0 | 31949 | 31964 | 1318 |
| 548076 | 1644 | 1659 | CACCTTTCTCCTTCGA | eekd₁₀kke | 26 | n/a | n/a | 1319 |
| 548077 | 1691 | 1706 | ATTTGTTACCAAAGGA | eekd₁₀kke | 51 | 33135 | 33150 | 1320 |
| 548078 | 1696 | 1711 | TCTTCATTTGTTACCA | eekd₁₀kke | 36 | 33140 | 33155 | 1321 |
| 548079 | 1762 | 1777 | CCTTCTTTATAGCCAG | eekd₁₀kke | 39 | 33206 | 33221 | 1322 |
| 548080 | 1763 | 1778 | CCCTTCTTTATAGCCA | eekd₁₀kke | 0 | 33207 | 33222 | 1323 |
| 548081 | 1764 | 1779 | CCCCTTCTTTATAGCC | eekd₁₀kke | 64 | 33208 | 33223 | 1324 |
| 548082 | 1776 | 1791 | AAGCATCTTTTCCCCC | eekd₁₀kke | 42 | 33220 | 33235 | 1325 |
| 548083 | 1800 | 1815 | AGGGACCACCTGAATC | eekd₁₀kke | 0 | 33899 | 33914 | 1326 |
| 548084 | 1801 | 1816 | AAGGGACCACCTGAAT | eekd₁₀kke | 0 | 33900 | 33915 | 1327 |
| 548085 | 1802 | 1817 | TAAGGGACCACCTGAA | eekd₁₀kke | 8 | 33901 | 33916 | 1328 |
| 548086 | 1803 | 1818 | CTAAGGGACCACCTGA | eekd₁₀kke | 36 | 33902 | 33917 | 1329 |
| 548087 | 1804 | 1819 | ACTAAGGGACCACCTG | eekd₁₀kke | 24 | 33903 | 33918 | 1330 |
| 548088 | 1805 | 1820 | AACTAAGGGACCACCT | eekd₁₀kke | 27 | 33904 | 33919 | 1331 |
| 548089 | 1806 | 1821 | AAACTAAGGGACCACC | eekd₁₀kke | 34 | 33905 | 33920 | 1332 |
| 548090 | 1807 | 1822 | CAAACTAAGGGACCAC | eekd₁₀kke | 46 | 33906 | 33921 | 1333 |
| 548091 | 1809 | 1824 | TGCAAACTAAGGGACC | eekd₁₀kke | 62 | 33908 | 33923 | 1334 |
| 548092 | 1810 | 1825 | TTGCAAACTAAGGGAC | eekd₁₀kke | 30 | 33909 | 33924 | 1335 |
| 548093 | 1811 | 1826 | TTTGCAAACTAAGGGA | eekd₁₀kke | 0 | 33910 | 33925 | 1336 |
| 548094 | 1812 | 1827 | GTTTGCAAACTAAGGG | eekd₁₀kke | 74 | 33911 | 33926 | 1337 |
| 548095 | 1813 | 1828 | TGTTTGCAAACTAAGG | eekd₁₀kke | 35 | 33912 | 33927 | 1338 |
| 548096 | 1814 | 1829 | GTGTTTGCAAACTAAG | eekd₁₀kke | 23 | 33913 | 33928 | 1339 |
| 548097 | 1876 | 1891 | TGCTCCCTGCGGGCAC | eekd₁₀kke | 2 | 33975 | 33990 | 1340 |
| 548098 | 1887 | 1902 | AGACACCAGGTTGCTC | eekd₁₀kke | 0 | 33986 | 34001 | 1341 |
| 548099 | 1904 | 1919 | CTCAGCGACTTTGGTG | eekd₁₀kke | 55 | 34003 | 34018 | 1342 |
| 548100 | 1905 | 1920 | ACTCAGCGACTTTGGT | eekd₁₀kke | 25 | 34004 | 34019 | 1343 |
| 548101 | 1906 | 1921 | TACTCAGCGACTTTGG | eekd₁₀kke | 47 | 34005 | 34020 | 1344 |
| 548102 | 1907 | 1922 | GTACTCAGCGACTTTG | eekd₁₀kke | 58 | 34006 | 34021 | 1345 |
| 548103 | 1908 | 1923 | TGTACTCAGCGACTTT | eekd₁₀kke | 66 | 34007 | 34022 | 1346 |
| 548104 | 1909 | 1924 | ATGTACTCAGCGACTT | eekd₁₀kke | 59 | 34008 | 34023 | 1347 |
| 548105 | 1910 | 1925 | CATGTACTCAGCGACT | eekd₁₀kke | 49 | 34009 | 34024 | 1348 |
| 548106 | 1911 | 1926 | CCATGTACTCAGCGAC | eekd₁₀kke | 79 | 34010 | 34025 | 1349 |
| 548107 | 1912 | 1927 | TCCATGTACTCAGCGA | eekd₁₀kke | 76 | 34011 | 34026 | 1350 |
| 548108 | 1953 | 1968 | GAGCTTTTCCATCACT | eekd₁₀kke | 61 | 34052 | 34067 | 1351 |
| 548109 | 1959 | 1974 | GCATCTGAGCTTTTCC | eekd₁₀kke | 77 | 34058 | 34073 | 1352 |
| 548110 | 1960 | 1975 | TGCATCTGAGCTTTTC | eekd₁₀kke | 62 | 34059 | 34074 | 1353 |
| 548111 | 1963 | 1978 | GACTGCATCTGAGCTT | eekd₁₀kke | 53 | 34062 | 34077 | 1354 |
| 548112 | 1965 | 1980 | GTGACTGCATCTGAGC | eekd₁₀kke | 23 | 34064 | 34079 | 1355 |
| 548113 | 1966 | 1981 | GGTGACTGCATCTGAG | eekd₁₀kke | 56 | 34065 | 34080 | 1356 |
| 548114 | 1967 | 1982 | TGGTGACTGCATCTGA | eekd₁₀kke | 70 | 34066 | 34081 | 1357 |
| 548115 | 1972 | 1987 | CATGCTGGTGACTGCA | eekd₁₀kke | 76 | 34071 | 34086 | 1358 |
| 548116 | 1973 | 1988 | TCATGCTGGTGACTGC | eekd₁₀kke | 3 | 34072 | 34087 | 1359 |
| 548117 | 1974 | 1989 | CTCATGCTGGTGACTG | eekd₁₀kke | 73 | 34073 | 34088 | 1360 |
| 548118 | 1975 | 1990 | TCTCATGCTGGTGACT | eekd₁₀kke | 47 | 34074 | 34089 | 1361 |
| 548119 | 1984 | 1999 | TGGACTGCTTCTCATG | eekd₁₀kke | 25 | 34083 | 34098 | 1362 |
| 548121 | 1986 | 2001 | TCTGGACTGCTTCTCA | eekd₁₀kke | 64 | 34085 | 34100 | 1363 |
| 548122 | 1987 | 2002 | CTCTGGACTGCTTCTC | eekd₁₀kke | 55 | 34086 | 34101 | 1364 |
| 548123 | 1990 | 2005 | AGACTCTGGACTGCTT | eekd₁₀kke | 49 | 34089 | 34104 | 1365 |
| 548124 | 1991 | 2006 | TAGACTCTGGACTGCT | eekd₁₀kke | 51 | 34090 | 34105 | 1366 |
| 548125 | 1992 | 2007 | CTAGACTCTGGACTGC | eekd₁₀kke | 89 | 34091 | 34106 | 1367 |
| 548126 | 1995 | 2010 | TGCCTAGACTCTGGAC | eekd₁₀kke | 19 | 34094 | 34109 | 1368 |
| 548127 | 1996 | 2011 | TTGCCTAGACTCTGGA | eekd₁₀kke | 60 | 34095 | 34110 | 1369 |
| 548128 | 1997 | 2012 | ATTGCCTAGACTCTGG | eekd₁₀kke | 55 | 34096 | 34111 | 1370 |
| 548129 | 2022 | 2037 | TTTGACTTGAACTCAG | eekd₁₀kke | 35 | 34121 | 34136 | 1371 |
| 548130 | 2023 | 2038 | ATTTGACTTGAACTCA | eekd₁₀kke | 27 | 34122 | 34137 | 1372 |
| 548131 | 2024 | 2039 | AATTTGACTTGAACTC | eekd₁₀kke | 45 | 34123 | 34138 | 1373 |
| 548132 | 2025 | 2040 | GAATTTGACTTGAACT | eekd₁₀kke | 0 | 34124 | 34139 | 1374 |
| 548133 | 2026 | 2041 | AGAATTTGACTTGAAC | eekd₁₀kke | 23 | 34125 | 34140 | 1375 |
| 548134 | 2027 | 2042 | CAGAATTTGACTTGAA | eekd₁₀kke | 17 | 34126 | 34141 | 1376 |
| 548135 | 2028 | 2043 | TCAGAATTTGACTTGA | eekd₁₀kke | 46 | 34127 | 34142 | 1377 |
| 548136 | 2031 | 2046 | GGCTCAGAATTTGACT | eekd₁₀kke | 39 | 34130 | 34145 | 1378 |
| 548137 | 2032 | 2047 | AGGCTCAGAATTTGAC | eekd₁₀kke | 62 | 34131 | 34146 | 1379 |
| 548138 | 2036 | 2051 | CCCCAGGCTCAGAATT | eekd₁₀kke | 52 | 34135 | 34150 | 1380 |
| 548139 | 2047 | 2062 | AGATGAGGACCCCCCA | eekd₁₀kke | 56 | 34146 | 34161 | 1381 |
| 548140 | 2048 | 2063 | CAGATGAGGACCCCCC | eekd₁₀kke | 74 | 34147 | 34162 | 1382 |
| 548141 | 2049 | 2064 | GCAGATGAGGACCCCC | eekd₁₀kke | 66 | 34148 | 34163 | 1383 |
| 548142 | 2063 | 2078 | ACTCTCCATGCTTTGC | eekd₁₀kke | 44 | 34162 | 34177 | 1384 |
| 548143 | 2064 | 2079 | CACTCTCCATGCTTTG | eekd₁₀kke | 39 | 34163 | 34178 | 1385 |
| 548144 | 2068 | 2083 | ATGCCACTCTCCATGC | eekd₁₀kke | 52 | 34167 | 34182 | 1386 |
| 548145 | 2079 | 2094 | ATGCAAAGAAGATGCC | eekd₁₀kke | 63 | 34178 | 34193 | 1387 |
| 548146 | 2088 | 2103 | GTCCTTAGGATGCAAA | eekd₁₀kke | 68 | 34187 | 34202 | 1388 |
| 548147 | 2089 | 2104 | CGTCCTTAGGATGCAA | eekd₁₀kke | 81 | 34188 | 34203 | 1389 |
| 548148 | 2114 | 2129 | GCAGCTCTGAGTGCAC | eekd₁₀kke | 66 | 34213 | 34228 | 1390 |
| 548149 | 2127 | 2142 | GACATTGTCCTCAGCA | eekd₁₀kke | 39 | 34226 | 34241 | 1391 |
| 548150 | 2129 | 2144 | CAGACATTGTCCTCAG | eekd₁₀kke | 60 | 34228 | 34243 | 1392 |

TABLE 141

| | SEQ | SEQ | | | | SEQ | SEQ | |
|---|---|---|---|---|---|---|---|---|
| | ID | ID | | | | ID | ID | |
| | NO: | NO: | | | | NO: | NO: | |
| | 1 | 1 | | | | 10 | 10 | SEQ |
| ISIS | Start | Stop | | | % | Start | Stop | ID |
| NO | Site | Site | Sequence | Chemistry | inhibition | Site | Site | NO |
| 547747 | n/a | n/a | TCACTGTACTAGTTTC | eekd₁₀kke | 84 | 14746 | 14761 | 1267 |
| | | | | | | 14817 | 14832 | |
| | | | | | | 14888 | 14903 | |
| | | | | | | 14947 | 14962 | |
| | | | | | | 15007 | 15022 | |
| | | | | | | 15079 | 15094 | |
| | | | | | | 15222 | 15237 | |
| | | | | | | 15294 | 15309 | |
| | | | | | | 15353 | 15368 | |
| | | | | | | 15413 | 15428 | |
| | | | | | | 15485 | 15500 | |
| | | | | | | 15557 | 15572 | |
| | | | | | | 15615 | 15630 | |
| | | | | | | 15687 | 15702 | |
| | | | | | | 15817 | 15832 | |
| | | | | | | 15889 | 15904 | |
| | | | | | | 15947 | 15962 | |
| 547843 | 384 | 399 | CACTTATTTGATGACC | eekd₁₀kke | 83 | 9918 | 9933 | 1393 |
| 547844 | 385 | 400 | GCACTTATTTGATGAC | eekd₁₀kke | 13 | n/a | n/a | 1394 |
| 547845 | 394 | 409 | CGATGGCAAGCACTTA | eekd₁₀kke | 0 | n/a | n/a | 1395 |
| 547846 | 395 | 410 | TCGATGGCAAGCACTT | eekd₁₀kke | 0 | n/a | n/a | 1396 |
| 547847 | 396 | 411 | CTCGATGGCAAGCACT | eekd₁₀kke | 46 | n/a | n/a | 1397 |
| 547848 | 400 | 415 | ATGTCTCGATGGCAAG | eekd₁₀kke | 93 | 12656 | 12671 | 1398 |
| 547849 | 401 | 416 | AATGTCTCGATGGCAA | eekd₁₀kke | 79 | 12657 | 12672 | 1399 |
| 547850 | 402 | 417 | AAATGTCTCGATGGCA | eekd₁₀kke | 51 | 12658 | 12673 | 1400 |
| 547851 | 403 | 418 | TAAATGTCTCGATGGC | eekd₁₀kke | 93 | 12659 | 12674 | 1401 |
| 547852 | 404 | 419 | ATAAATGTCTCGATGG | eekd₁₀kke | 67 | 12660 | 12675 | 1402 |
| 547853 | 405 | 420 | TATAAATGTCTCGATG | eekd₁₀kke | 0 | 12661 | 12676 | 1403 |
| 547854 | 416 | 431 | ATCAACTCCTTTATAA | eekd₁₀kke | 10 | 12672 | 12687 | 1404 |
| 547855 | 417 | 432 | TATCAACTCCTTTATA | eekd₁₀kke | 59 | 12673 | 12688 | 1405 |
| 547856 | 419 | 434 | CATATCAACTCCTTTA | eekd₁₀kke | 93 | 12675 | 12690 | 1406 |
| 547858 | 423 | 438 | CTCTCATATCAACTCC | eekd₁₀kke | 82 | 12679 | 12694 | 1407 |
| 547859 | 424 | 439 | CCTCTCATATCAACTC | eekd₁₀kke | 77 | 12680 | 12695 | 1408 |
| 547860 | 425 | 440 | TCCTCTCATATCAACT | eekd₁₀kke | 71 | 12681 | 12696 | 1409 |
| 547861 | 427 | 442 | ACTCCTCTCATATCAA | eekd₁₀kke | 0 | 12683 | 12698 | 1410 |
| 547862 | 428 | 443 | GACTCCTCTCATATCA | eekd₁₀kke | 22 | 12684 | 12699 | 1411 |
| 547863 | 429 | 444 | TGACTCCTCTCATATC | eekd₁₀kke | 73 | 12685 | 12700 | 1412 |
| 547864 | 430 | 445 | TTGACTCCTCTCATAT | eekd₁₀kke | 53 | 12686 | 12701 | 1413 |
| 547865 | 434 | 449 | AAAATTGACTCCTCTC | eekd₁₀kke | 3 | 12690 | 12705 | 1414 |
| 547866 | 436 | 451 | TTAAAATTGACTCCTC | eekd₁₀kke | 46 | 12692 | 12707 | 1415 |
| 547867 | 447 | 462 | CCTTAGACACATTAAA | eekd₁₀kke | 34 | 12703 | 12718 | 1416 |
| 547868 | 448 | 463 | ACCTTAGACACATTAA | eekd₁₀kke | 47 | 12704 | 12719 | 1417 |
| 547869 | 449 | 464 | AACCTTAGACACATTA | eekd₁₀kke | 45 | 12705 | 12720 | 1418 |
| 547870 | 451 | 466 | CTAACCTTAGACACAT | eekd₁₀kke | 89 | 12707 | 12722 | 1419 |
| 547871 | 452 | 467 | GCTAACCTTAGACACA | eekd₁₀kke | 96 | 12708 | 12723 | 1420 |
| 547872 | 453 | 468 | TGCTAACCTTAGACAC | eekd₁₀kke | 85 | 12709 | 12724 | 1421 |
| 547873 | 454 | 469 | CTGCTAACCTTAGACA | eekd₁₀kke | 77 | 12710 | 12725 | 1422 |
| 547874 | 455 | 470 | ACTGCTAACCTTAGAC | eekd₁₀kke | 70 | 12711 | 12726 | 1423 |
| 547875 | 456 | 471 | CACTGCTAACCTTAGA | eekd₁₀kke | 73 | 12712 | 12727 | 1424 |
| 547876 | 457 | 472 | ACACTGCTAACCTTAG | eekd₁₀kke | 78 | 12713 | 12728 | 1425 |
| 547877 | 458 | 473 | AACACTGCTAACCTTA | eekd₁₀kke | 81 | 12714 | 12729 | 1426 |
| 547879 | 460 | 475 | TCAACACTGCTAACCT | eekd₁₀kke | 69 | 12716 | 12731 | 1427 |
| 547880 | 461 | 476 | TTCAACACTGCTAACC | eekd₁₀kke | 69 | 12717 | 12732 | 1428 |
| 547881 | 465 | 480 | ATTCTTCAACACTGCT | eekd₁₀kke | 0 | 12721 | 12736 | 1429 |
| 547882 | 500 | 515 | CTGGCAGCGAATGTTA | eekd₁₀kke | 91 | 12756 | 12771 | 1430 |
| 547883 | 501 | 516 | ACTGGCAGCGAATGTT | eekd₁₀kke | 99 | 12757 | 12772 | 1431 |
| 547884 | 518 | 533 | CGTGGCATATGAAAAA | eekd₁₀kke | 87 | 12774 | 12789 | 1432 |
| 547885 | 539 | 554 | CTCTGCCTTGTGAAAT | eekd₁₀kke | 45 | 12795 | 12810 | 1433 |
| 547886 | 544 | 559 | CGGTACTCTGCCTTGT | eekd₁₀kke | 97 | 12800 | 12815 | 1434 |
| 547889 | 547 | 562 | TTCCGGTACTCTGCCT | eekd₁₀kke | 91 | n/a | n/a | 1435 |
| 547890 | 550 | 565 | TTGTTCCGGTACTCTG | eekd₁₀kke | 97 | n/a | n/a | 1436 |
| 547891 | 551 | 566 | ATTGTTCCGGTACTCT | eekd₁₀kke | 84 | n/a | n/a | 1437 |
| 547892 | 553 | 568 | CAATTGTTCCGGTACT | eekd₁₀kke | 29 | n/a | n/a | 1438 |
| 547893 | 554 | 569 | GCAATTGTTCCGGTAC | eekd₁₀kke | 81 | n/a | n/a | 1439 |
| 547894 | 555 | 570 | GGCAATTGTTCCGGTA | eekd10kke | 92 | n/a | n/a | 1440 |
| 547898 | 563 | 578 | CTTTAATAGGCAATTG | eekd₁₀kke | 0 | 14134 | 14149 | 1441 |
| 547899 | 566 | 581 | GTACTTTAATAGGCAA | eekd₁₀kke | 49 | 14137 | 14152 | 1442 |
| 547900 | 567 | 582 | TGTACTTTAATAGGCA | eekd₁₀kke | 93 | 14138 | 14153 | 1443 |
| 547901 | 568 | 583 | CTGTACTTTAATAGGC | eekd₁₀kke | 77 | 14139 | 14154 | 1444 |
| 547902 | 569 | 584 | ACTGTACTTTAATAGG | eekd₁₀kke | 20 | 14140 | 14155 | 1445 |
| 547903 | 604 | 619 | CTCAGCACCTTTATAG | eekd₁₀kke | 62 | 14175 | 14190 | 1446 |
| 547904 | 605 | 620 | ACTCAGCACCTTTATA | eekd₁₀kke | 56 | 14176 | 14191 | 1447 |
| 547905 | 606 | 621 | TACTCAGCACCTTTAT | eekd₁₀kke | 20 | 14177 | 14192 | 1448 |
| 547906 | 607 | 622 | TTACTCAGCACCTTTA | eekd₁₀kke | 59 | 14178 | 14193 | 1449 |
| 547907 | 652 | 667 | ATTTCTGAAAGGGCAC | eekd₁₀kke | 27 | 14223 | 14238 | 1450 |
| 547908 | 654 | 669 | CAATTTCTGAAAGGGC | eekd₁₀kke | 94 | 14225 | 14240 | 1451 |
| 547909 | 655 | 670 | CCAATTTCTGAAAGGG | eekd₁₀kke | 82 | 14226 | 14241 | 1452 |
| 547910 | 656 | 671 | ACCAATTTCTGAAAGG | eekd₁₀kke | 26 | 14227 | 14242 | 1453 |
| 547911 | 661 | 676 | TGGCAACCAATTTCTG | eekd₁₀kke | 0 | n/a | n/a | 1454 |
| 547912 | 701 | 716 | ATCCACATCTGAGAAC | eekd₁₀kke | 23 | 26149 | 26164 | 1455 |
| 547913 | 706 | 721 | GCAACATCCACATCTG | eekd₁₀kke | 71 | 26154 | 26169 | 1456 |
| 547914 | 707 | 722 | GGCAACATCCACATCT | eekd₁₀kke | 74 | 26155 | 26170 | 1457 |
| 547915 | 708 | 723 | TGGCAACATCCACATC | eekd₁₀kke | 0 | 26156 | 26171 | 1458 |
| 547916 | 710 | 725 | CCTGGCAACATCCACA | eekd₁₀kke | 70 | 26158 | 26173 | 1459 |
| 547917 | 712 | 727 | ACCCTGGCAACATCCA | eekd₁₀kke | 33 | 26160 | 26175 | 1460 |
| 547918 | 713 | 728 | AACCCTGGCAACATCC | eekd₁₀kke | 1 | 26161 | 26176 | 1461 |
| 547919 | 714 | 729 | GAACCCTGGCAACATC | eekd₁₀kke | 41 | 26162 | 26177 | 1462 |

TABLE 142

| | SEQ | SEQ | | | | SEQ | SEQ | |
|---|---|---|---|---|---|---|---|---|
| | ID | ID | | | | ID | ID | |
| | NO: | NO: | | | | NO: | NO: | |
| | 1 | 1 | | | | 10 | 10 | SEQ |
| ISIS | Start | Stop | | | % | Start | Stop | ID |
| NO | Site | Site | Sequence | Chemistry | inhibition | Site | Site | NO |
| 531231 | n/a | n/a | TATCACTGTACTAGTTTCCT | eeeeed₁₀eeeee | 62 | 14744 | 14763 | 334 |
| | | | | | | 14815 | 14834 | |
| | | | | | | 14886 | 14905 | |
| | | | | | | 14945 | 14964 | |
| | | | | | | 15005 | 15024 | |
| | | | | | | 15077 | 15096 | |
| | | | | | | 15220 | 15239 | |
| | | | | | | 15292 | 15311 | |
| | | | | | | 15351 | 15370 | |
| | | | | | | 15411 | 15430 | |
| | | | | | | 15483 | 15502 | |
| | | | | | | 15555 | 15574 | |
| | | | | | | 15613 | 15632 | |
| | | | | | | 15685 | 15704 | |
| | | | | | | 15815 | 15834 | |
| | | | | | | 15887 | 15906 | |
| | | | | | | 15945 | 15964 | |
| 547747 | n/a | n/a | TCACTGTACTAGTTTC | eekd₁₀kke | 88 | 14746 | 14761 | 1267 |
| | | | | | | 14817 | 14832 | |
| | | | | | | 14888 | 14903 | |
| | | | | | | 14947 | 14962 | |
| | | | | | | 15007 | 15022 | |
| | | | | | | 15079 | 15094 | |
| | | | | | | 15222 | 15237 | |
| | | | | | | 15294 | 15309 | |
| | | | | | | 15353 | 15368 | |
| | | | | | | 15413 | 15428 | |
| | | | | | | 15485 | 15500 | |
| | | | | | | 15557 | 15572 | |
| | | | | | | 15615 | 15630 | |
| | | | | | | 15687 | 15702 | |
| | | | | | | 15817 | 15832 | |
| | | | | | | 15889 | 15904 | |
| | | | | | | 15947 | 15962 | |
| 547751 | 7 | 22 | TGAACGGTCTTCAAGC | eekd₁₀kke | 0 | 3399 | 3414 | 1463 |
| 547753 | 8 | 23 | ATGAACGGTCTTCAAG | eekd₁₀kke | 3 | 3400 | 3415 | 1464 |
| 547755 | 13 | 28 | TAAAAATGAACGGTCT | eekd₁₀kke | 0 | 3405 | 3420 | 1465 |
| 547757 | 28 | 43 | GAGTCTCTTGTCACTT | eekd₁₀kke | 69 | 3420 | 3435 | 1466 |
| 547759 | 29 | 44 | TGAGTCTCTTGTCACT | eekd₁₀kke | 73 | 3421 | 3436 | 1467 |
| 547763 | 31 | 46 | GGTGAGTCTCTTGTCA | eekd₁₀kke | 66 | 3423 | 3438 | 1468 |
| 547765 | 32 | 47 | AGGTGAGTCTCTTGTC | eekd₁₀kke | 20 | 3424 | 3439 | 1469 |
| 547767 | 35 | 50 | TGGAGGTGAGTCTCTT | eekd₁₀kke | 74 | 3427 | 3442 | 1470 |
| 547769 | 36 | 51 | TTGGAGGTGAGTCTCT | eekd₁₀kke | 81 | 3428 | 3443 | 1471 |
| 547771 | 37 | 52 | CTTGGAGGTGAGTCTC | eekd₁₀kke | 60 | 3429 | 3444 | 1472 |
| 547773 | 38 | 53 | TCTTGGAGGTGAGTCT | eekd₁₀kke | 47 | 3430 | 3445 | 1473 |
| 547777 | 43 | 58 | TTGCTTCTTGGAGGTG | eekd₁₀kke | 69 | 3435 | 3450 | 1474 |
| 547779 | 44 | 59 | ATTGCTTCTTGGAGGT | eekd₁₀kke | 41 | 3436 | 3451 | 1475 |
| 547781 | 46 | 61 | CAATTGCTTCTTGGAG | eekd₁₀kke | 49 | 3438 | 3453 | 1476 |
| 547783 | 48 | 63 | CACAATTGCTTCTTGG | eekd₁₀kke | 48 | 3440 | 3455 | 1477 |
| 547784 | 72 | 87 | GCTTGAATAAAATCAT | eekd₁₀kke | 46 | 4071 | 4086 | 1478 |
| 547785 | 79 | 94 | GTTGCTTGCTTGAATA | eekd₁₀kke | 48 | 4078 | 4093 | 1479 |
| 547786 | 80 | 95 | AGTTGCTTGCTTGAAT | eekd₁₀kke | 44 | 4079 | 4094 | 1480 |
| 547787 | 81 | 96 | AAGTTGCTTGCTTGAA | eekd₁₀kke | 22 | 4080 | 4095 | 1481 |
| 547788 | 82 | 97 | TAAGTTGCTTGCTTGA | eekd₁₀kke | 49 | 4081 | 4096 | 1482 |
| 547789 | 86 | 101 | GAAATAAGTTGCTTGC | eekd₁₀kke | 20 | 4085 | 4100 | 1483 |
| 547790 | 87 | 102 | TGAAATAAGTTGCTTG | eekd₁₀kke | 23 | 4086 | 4101 | 1484 |
| 547791 | 106 | 121 | ACTGTAGCAAACAAGG | eekd₁₀kke | 49 | 4105 | 4120 | 1485 |
| 547792 | 116 | 131 | TCCACAGGAAACTGTA | eekd₁₀kke | 31 | n/a | n/a | 1486 |
| 547793 | 117 | 132 | ATCCACAGGAAACTGT | eekd₁₀kke | 16 | n/a | n/a | 1487 |
| 547794 | 136 | 151 | TCATAGAGTTGAGTCA | eekd₁₀kke | 49 | 8008 | 8023 | 1488 |
| 547795 | 155 | 170 | ACCTCTGAAGAAGGCG | eekd₁₀kke | 66 | 8027 | 8042 | 1489 |
| 547796 | 161 | 176 | ATCCCCACCTCTGAAG | eekd₁₀kke | 35 | 8033 | 8048 | 1490 |
| 547797 | 167 | 182 | AGCTACATCCCCACCT | eekd₁₀kke | 33 | 8039 | 8054 | 1491 |
| 547799 | 169 | 184 | GAAGCTACATCCCCAC | eekd₁₀kke | 41 | 8041 | 8056 | 1492 |
| 547800 | 174 | 189 | ACATGGAAGCTACATC | eekd₁₀kke | 20 | 8046 | 8061 | 1493 |
| 547801 | 175 | 190 | TACATGGAAGCTACAT | eekd₁₀kke | 11 | 8047 | 8062 | 1494 |
| 547802 | 176 | 191 | GTACATGGAAGCTACA | eekd₁₀kke | 41 | 8048 | 8063 | 1495 |
| 547803 | 177 | 192 | TGTACATGGAAGCTAC | eekd₁₀kke | 0 | 8049 | 8064 | 1496 |
| 547804 | 178 | 193 | GTGTACATGGAAGCTA | eekd₁₀kke | 22 | 8050 | 8065 | 1497 |
| 547805 | 180 | 195 | GGGTGTACATGGAAGC | eekd₁₀kke | 54 | 8052 | 8067 | 1498 |
| 547807 | 197 | 212 | GCAGTATTGGGCATTT | eekd₁₀kke | 75 | 8069 | 8084 | 1499 |
| 547808 | 203 | 218 | CATCTGGCAGTATTGG | eekd₁₀kke | 56 | 8075 | 8090 | 1500 |
| 547809 | 204 | 219 | TCATCTGGCAGTATTG | eekd₁₀kke | 33 | 8076 | 8091 | 1501 |
| 547810 | 206 | 221 | CCTCATCTGGCAGTAT | eekd₁₀kke | 60 | 8078 | 8093 | 1502 |
| 547811 | 207 | 222 | ACCTCATCTGGCAGTA | eekd₁₀kke | 49 | 8079 | 8094 | 1503 |
| 547812 | 211 | 226 | GTGCACCTCATCTGGC | eekd₁₀kke | 51 | 8083 | 8098 | 1504 |
| 547813 | 219 | 234 | GGTGGAATGTGCACCT | eekd₁₀kke | 34 | 8091 | 8106 | 1505 |
| 547814 | 220 | 235 | GGGTGGAATGTGCACC | eekd₁₀kke | 60 | 8092 | 8107 | 1506 |
| 547815 | 255 | 270 | AACTTGCTGGAAGAAA | eekd₁₀kke | 3 | 8127 | 8142 | 1507 |
| 547816 | 256 | 271 | GAACTTGCTGGAAGAA | eekd₁₀kke | 45 | 8128 | 8143 | 1508 |
| 547817 | 257 | 272 | TGAACTTGCTGGAAGA | eekd₁₀kke | 18 | 8129 | 8144 | 1509 |
| 547818 | 260 | 275 | GATTGAACTTGCTGGA | eekd₁₀kke | 4 | 8132 | 8147 | 1510 |
| 547819 | 264 | 279 | CATTGATTGAACTTGC | eekd₁₀kke | 11 | 8136 | 8151 | 1511 |
| 547820 | 265 | 280 | TCATTGATTGAACTTG | eekd₁₀kke | 0 | 8137 | 8152 | 1512 |
| 547821 | 282 | 297 | CAAACCTTTTCTCCAT | eekd₁₀kke | 44 | n/a | n/a | 1513 |
| 547822 | 287 | 302 | GCAACCAAACCTTTTC | eekd₁₀kke | 71 | n/a | n/a | 1514 |
| 547823 | 288 | 303 | AGCAACCAAACCTTTT | eekd₁₀kke | 51 | n/a | n/a | 1515 |
| 547824 | 331 | 346 | CGATGTACTTTTGGCA | eekd₁₀kke | 82 | 9865 | 9880 | 1516 |
| 547825 | 332 | 347 | TCGATGTACTTTTGGC | eekd₁₀kke | 59 | 9866 | 9881 | 1517 |
| 547826 | 333 | 348 | TTCGATGTACTTTTGG | eekd₁₀kke | 31 | 9867 | 9882 | 1518 |
| 547827 | 334 | 349 | GTTCGATGTACTTTTG | eekd₁₀kke | 47 | 9868 | 9883 | 1519 |
| 547828 | 337 | 352 | CCTGTTCGATGTACTT | eekd₁₀kke | 63 | 9871 | 9886 | 1520 |
| 547829 | 338 | 353 | ACCTGTTCGATGTACT | eekd₁₀kke | 59 | 9872 | 9887 | 1521 |
| 547830 | 340 | 355 | GCACCTGTTCGATGTA | eekd₁₀kke | 74 | 9874 | 9889 | 1522 |
| 547831 | 342 | 357 | CTGCACCTGTTCGATG | eekd₁₀kke | 49 | 9876 | 9891 | 1523 |
| 547832 | 343 | 358 | ACTGCACCTGTTCGAT | eekd₁₀kke | 59 | 9877 | 9892 | 1524 |
| 547833 | 344 | 359 | AACTGCACCTGTTCGA | eekd₁₀kke | 40 | 9878 | 9893 | 1525 |
| 547834 | 345 | 360 | AAACTGCACCTGTTCG | eekd₁₀kke | 63 | 9879 | 9894 | 1526 |
| 547835 | 349 | 364 | CCAGAAACTGCACCTG | eekd₁₀kke | 81 | 9883 | 9898 | 1527 |
| 547836 | 350 | 365 | TCCAGAAACTGCACCT | eekd₁₀kke | 50 | 9884 | 9899 | 1528 |
| 547837 | 352 | 367 | TGTCCAGAAACTGCAC | eekd₁₀kke | 51 | 9886 | 9901 | 1529 |
| 547838 | 362 | 377 | CTTCAAGGAATGTCCA | eekd₁₀kke | 45 | 9896 | 9911 | 1530 |
| 547839 | 363 | 378 | GCTTCAAGGAATGTCC | eekd₁₀kke | 35 | 9897 | 9912 | 1531 |
| 547840 | 365 | 380 | TTGCTTCAAGGAATGT | eekd₁₀kke | 36 | 9899 | 9914 | 1532 |
| 547841 | 369 | 384 | CACATTGCTTCAAGGA | eekd₁₀kke | 42 | 9903 | 9918 | 1533 |
| 547842 | 375 | 390 | GATGACCACATTGCTT | eekd₁₀kke | 10 | 9909 | 9924 | 1534 |

TABLE 143

| | SEQ | SEQ | | | | SEQ | SEQ | |
|---|---|---|---|---|---|---|---|---|
| | ID | ID | | | | ID | ID | |
| | NO: | NO: | | | | NO: | NO: | |
| | 1 | 1 | | | % | 10 | 10 | SEQ |
| | Start | Stop | | | inhi- | Start | Stop | ID |
| ISIS NO | Site | Site | Sequence | Chemistry | bition | Site | Site | NO |
| 531231 | n/a | n/a | TATCACTGTACTAGTT | eeeeed₁₀eeeee | 75 | 14744 | 14763 | 334 |
| | | | TCCT | | | 14815 | 14834 | |
| | | | | | | 14886 | 14905 | |
| | | | | | | 14945 | 14964 | |
| | | | | | | 15005 | 15024 | |
| | | | | | | 15077 | 15096 | |
| | | | | | | 15220 | 15239 | |
| | | | | | | 15292 | 15311 | |
| | | | | | | 15351 | 15370 | |
| | | | | | | 15411 | 15430 | |
| | | | | | | 15483 | 15502 | |
| | | | | | | 15555 | 15574 | |
| | | | | | | 15613 | 15632 | |
| | | | | | | 15685 | 15704 | |
| | | | | | | 15815 | 15834 | |
| | | | | | | 15887 | 15906 | |
| | | | | | | 15945 | 15964 | |
| 547747 | n/a | n/a | TCACTGTACTAGTTTC | eekd₁₀kke | 91 | 14746 | 14761 | 1267 |
| | | | | | | 14817 | 14832 | |
| | | | | | | 14888 | 14903 | |
| | | | | | | 14947 | 14962 | |
| | | | | | | 15007 | 15022 | |
| | | | | | | 15079 | 15094 | |
| | | | | | | 15222 | 15237 | |
| | | | | | | 15294 | 15309 | |
| | | | | | | 15353 | 15368 | |
| | | | | | | 15413 | 15428 | |
| | | | | | | 15485 | 15500 | |
| | | | | | | 15557 | 15572 | |
| | | | | | | 15615 | 15630 | |
| | | | | | | 15687 | 15702 | |
| | | | | | | 15817 | 15832 | |
| | | | | | | 15889 | 15904 | |
| | | | | | | 15947 | 15962 | |
| 547843 | 384 | 399 | CACTTATTTGATGACC | eekd₁₀kke | 83 | 9918 | 9933 | 1393 |
| 547844 | 385 | 400 | GCACTTATTTGATGAC | eekd₁₀kke | 76 | n/a | n/a | 1394 |
| 547845 | 394 | 409 | CGATGGCAAGCACTTA | eekd₁₀kke | 64 | n/a | n/a | 1395 |
| 547846 | 395 | 410 | TCGATGGCAAGCACTT | eekd₁₀kke | 42 | n/a | n/a | 1396 |
| 547847 | 396 | 411 | CTCGATGGCAAGCACT | eekd₁₀kke | 72 | n/a | n/a | 1397 |
| 547848 | 400 | 415 | ATGTCTCGATGGCAAG | eekd₁₀kke | 79 | 12656 | 12671 | 1398 |
| 547849 | 401 | 416 | AATGTCTCGATGGCAA | eekd₁₀kke | 90 | 12657 | 12672 | 1399 |
| 547850 | 402 | 417 | AAATGTCTCGATGGCA | eekd₁₀kke | 80 | 12658 | 12673 | 1400 |
| 547851 | 403 | 418 | TAAATGTCTCGATGGC | eekd₁₀kke | 84 | 12659 | 12674 | 1401 |
| 547852 | 404 | 419 | ATAAATGTCTCGATGG | eekd₁₀kke | 66 | 12660 | 12675 | 1402 |
| 547853 | 405 | 420 | TATAAATGTCTCGATG | eekd₁₀kke | 30 | 12661 | 12676 | 1403 |
| 547854 | 416 | 431 | ATCAACTCCTTTATAA | eekd₁₀kke | 9 | 12672 | 12687 | 1404 |
| 547855 | 417 | 432 | TATCAACTCCTTTATA | eekd₁₀kke | 38 | 12673 | 12688 | 1405 |
| 547856 | 419 | 434 | CATATCAACTCCTTTA | eekd₁₀kke | 51 | 12675 | 12690 | 1406 |
| 547857 | 421 | 436 | CTCATATCAACTCCTT | eekd₁₀kke | 84 | 12677 | 12692 | 1535 |
| 547858 | 423 | 438 | CTCTCATATCAACTCC | eekd₁₀kke | 76 | 12679 | 12694 | 1407 |
| 547859 | 424 | 439 | CCTCTCATATCAACTC | eekd₁₀kke | 88 | 12680 | 12695 | 1408 |
| 547860 | 425 | 440 | TCCTCTCATATCAACT | eekd₁₀kke | 70 | 12681 | 12696 | 1409 |
| 547861 | 427 | 442 | ACTCCTCTCATATCAA | eekd₁₀kke | 57 | 12683 | 12698 | 1410 |
| 547862 | 428 | 443 | GACTCCTCTCATATCA | eekd₁₀kke | 88 | 12684 | 12699 | 1411 |
| 547863 | 429 | 444 | TGACTCCTCTCATATC | eekd₁₀kke | 77 | 12685 | 12700 | 1412 |
| 547864 | 430 | 445 | TTGACTCCTCTCATAT | eekd₁₀kke | 73 | 12686 | 12701 | 1413 |
| 547865 | 434 | 449 | AAAATTGACTCCTCTC | eekd₁₀kke | 61 | 12690 | 12705 | 1414 |
| 547866 | 436 | 451 | TTAAAATTGACTCCTC | eekd₁₀kke | 40 | 12692 | 12707 | 1415 |
| 547867 | 447 | 462 | CCTTAGACACATTAAA | eekd₁₀kke | 53 | 12703 | 12718 | 1416 |
| 547868 | 448 | 463 | ACCTTAGACACATTAA | eekd₁₀kke | 71 | 12704 | 12719 | 1417 |
| 547869 | 449 | 464 | AACCTTAGACACATTA | eekd₁₀kke | 77 | 12705 | 12720 | 1418 |
| 547870 | 451 | 466 | CTAACCTTAGACACAT | eekd₁₀kke | 83 | 12707 | 12722 | 1419 |
| 547871 | 452 | 467 | GCTAACCTTAGACACA | eekd₁₀kke | 77 | 12708 | 12723 | 1420 |
| 547872 | 453 | 468 | TGCTAACCTTAGACAC | eekd₁₀kke | 73 | 12709 | 12724 | 1421 |
| 547873 | 454 | 469 | CTGCTAACCTTAGACA | eekd₁₀kke | 82 | 12710 | 12725 | 1422 |
| 547874 | 455 | 470 | ACTGCTAACCTTAGAC | eekd₁₀kke | 60 | 12711 | 12726 | 1423 |
| 547875 | 456 | 471 | CACTGCTAACCTTAGA | eekd₁₀kke | 57 | 12712 | 12727 | 1424 |
| 547876 | 457 | 472 | ACACTGCTAACCTTAG | eekd₁₀kke | 59 | 12713 | 12728 | 1425 |
| 547877 | 458 | 473 | AACACTGCTAACCTTA | eekd₁₀kke | 93 | 12714 | 12729 | 1426 |
| 547878 | 459 | 474 | CAACACTGCTAACCTT | eekd₁₀kke | 62 | 12715 | 12730 | 1536 |
| 547879 | 460 | 475 | TCAACACTGCTAACCT | eekd₁₀kke | 65 | 12716 | 12731 | 1427 |
| 547880 | 461 | 476 | TTCAACACTGCTAACC | eekd₁₀kke | 59 | 12717 | 12732 | 1428 |
| 547881 | 465 | 480 | ATTCTTCAACACTGCT | eekd₁₀kke | 50 | 12721 | 12736 | 1429 |
| 547882 | 500 | 515 | CTGGCAGCGAATGTTA | eekd₁₀kke | 96 | 12756 | 12771 | 1430 |
| 547883 | 501 | 516 | ACTGGCAGCGAATGTT | eekd₁₀kke | 0 | 12757 | 12772 | 1431 |
| 547884 | 518 | 533 | CGTGGCATATGAAAAA | eekd₁₀kke | 49 | 12774 | 12789 | 1432 |
| 547885 | 539 | 554 | CTCTGCCTTGTGAAAT | eekd₁₀kke | 57 | 12795 | 12810 | 1433 |
| 547886 | 544 | 559 | CGGTACTCTGCCTTGT | eekd₁₀kke | 89 | 12800 | 12815 | 1434 |
| 547887 | 545 | 560 | CCGGTACTCTGCCTTG | eekd₁₀kke | 99 | 12801 | 12816 | 1537 |
| 547888 | 546 | 561 | TCCGGTACTCTGCCTT | eekd₁₀kke | 99 | n/a | n/a | 1538 |
| 547889 | 547 | 562 | TTCCGGTACTCTGCCT | eekd₁₀kke | 97 | n/a | n/a | 1435 |
| 547890 | 550 | 565 | TTGTTCCGGTACTCTG | eekd₁₀kke | 90 | n/a | n/a | 1436 |
| 547891 | 551 | 566 | ATTGTTCCGGTACTCT | eekd₁₀kke | 88 | n/a | n/a | 1437 |
| 547892 | 553 | 568 | CAATTGTTCCGGTACT | eekd₁₀kke | 28 | n/a | n/a | 1438 |
| 547893 | 554 | 569 | GCAATTGTTCCGGTAC | eekd₁₀kke | 80 | n/a | n/a | 1439 |
| 547894 | 555 | 570 | GGCAATTGTTCCGGTA | eekd₁₀kke | 91 | n/a | n/a | 1440 |
| 547895 | 556 | 571 | AGGCAATTGTTCCGGT | eekd₁₀kke | 94 | n/a | n/a | 1539 |
| 547896 | 557 | 572 | TAGGCAATTGTTCCGG | eekd₁₀kke | 95 | n/a | n/a | 1540 |
| 547897 | 558 | 573 | ATAGGCAATTGTTCCG | eekd₁₀kke | 82 | n/a | n/a | 1541 |
| 547898 | 563 | 578 | CTTTAATAGGCAATTG | eekd₁₀kke | 28 | 14134 | 14149 | 1441 |
| 547899 | 566 | 581 | GTACTTTAATAGGCAA | eekd₁₀kke | 68 | 14137 | 14152 | 1442 |
| 547900 | 567 | 582 | TGTACTTTAATAGGCA | eekd₁₀kke | 68 | 14138 | 14153 | 1443 |
| 547901 | 568 | 583 | CTGTACTTTAATAGGC | eekd₁₀kke | 85 | 14139 | 14154 | 1444 |
| 547902 | 569 | 584 | ACTGTACTTTAATAGG | eekd₁₀kke | 33 | 14140 | 14155 | 1445 |
| 547903 | 604 | 619 | CTCAGCACCTTTATAG | eekd₁₀kke | 6 | 14175 | 14190 | 1446 |
| 547904 | 605 | 620 | ACTCAGCACCTTTATA | eekd₁₀kke | 41 | 14176 | 14191 | 1447 |
| 547905 | 606 | 621 | TACTCAGCACCTTTAT | eekd₁₀kke | 59 | 14177 | 14192 | 1448 |
| 547906 | 607 | 622 | TTACTCAGCACCTTTA | eekd₁₀kke | 70 | 14178 | 14193 | 1449 |
| 547907 | 652 | 667 | ATTTCTGAAAGGGCAC | eekd₁₀kke | 27 | 14223 | 14238 | 1450 |
| 547908 | 654 | 669 | CAATTTCTGAAAGGGC | eekd₁₀kke | 71 | 14225 | 14240 | 1451 |
| 547909 | 655 | 670 | CCAATTTCTGAAAGGG | eekd₁₀kke | 51 | 14226 | 14241 | 1452 |
| 547910 | 656 | 671 | ACCAATTTCTGAAAGG | eekd₁₀kke | 34 | 14227 | 14242 | 1453 |
| 547911 | 661 | 676 | TGGCAACCAATTTCTG | eekd₁₀kke | 15 | n/a | n/a | 1454 |
| 547912 | 701 | 716 | ATCCACATCTGAGAAC | eekd₁₀kke | 53 | 26149 | 26164 | 1455 |
| 547913 | 706 | 721 | GCAACATCCACATCTG | eekd₁₀kke | 61 | 26154 | 26169 | 1456 |
| 547914 | 707 | 722 | GGCAACATCCACATCT | eekd₁₀kke | 63 | 26155 | 26170 | 1457 |
| 547915 | 708 | 723 | TGGCAACATCCACATC | eekd₁₀kke | 62 | 26156 | 26171 | 1458 |
| 547916 | 710 | 725 | CCTGGCAACATCCACA | eekd₁₀kke | 56 | 26158 | 26173 | 1459 |
| 547917 | 712 | 727 | ACCCTGGCAACATCCA | eekd₁₀kke | 54 | 26160 | 26175 | 1460 |
| 547918 | 713 | 728 | AACCCTGGCAACATCC | eekd₁₀kke | 65 | 26161 | 26176 | 1461 |
| 547919 | 714 | 729 | GAACCCTGGCAACATC | eekd₁₀kke | 73 | 26162 | 26177 | 1462 |

TABLE 144

| | SEQ | SEQ | | | | SEQ | SEQ | |
|---|---|---|---|---|---|---|---|---|
| | ID | ID | | | | ID | ID | |
| | NO: | NO: | | | | NO: | NO: | |
| | 1 | 1 | | | % | 10 | 10 | SEQ |
| | Start | Stop | | | inhi- | Start | Stop | ID |
| ISIS NO | Site | Site | Sequence | Chemistry | bition | Site | Site | NO |
| 531231 | n/a | n/a | TATCACTGTACTAGTT | eeeeed₁₀eeeee | 16 | 14744 | 14763 | 334 |
| | | | TCCT | | | 14815 | 14834 | |
| | | | | | | 14886 | 14905 | |
| | | | | | | 14945 | 14964 | |
| | | | | | | 15005 | 15024 | |
| | | | | | | 15077 | 15096 | |
| | | | | | | 15220 | 15239 | |
| | | | | | | 15292 | 15311 | |
| | | | | | | 15351 | 15370 | |
| | | | | | | 15411 | 15430 | |
| | | | | | | 15483 | 15502 | |
| | | | | | | 15555 | 15574 | |
| | | | | | | 15613 | 15632 | |
| | | | | | | 15685 | 15704 | |
| | | | | | | 15815 | 15834 | |
| | | | | | | 15887 | 15906 | |
| | | | | | | 15945 | 15964 | |
| 547747 | n/a | n/a | TCACTGTACTAGTTTC | eekd₁₀kke | 83 | 14746 | 14761 | 1267 |
| | | | | | | 14817 | 14832 | |
| | | | | | | 14888 | 14903 | |
| | | | | | | 14947 | 14962 | |
| | | | | | | 15007 | 15022 | |
| | | | | | | 15079 | 15094 | |
| | | | | | | 15222 | 15237 | |
| | | | | | | 15294 | 15309 | |
| | | | | | | 15353 | 15368 | |
| | | | | | | 15413 | 15428 | |
| | | | | | | 15485 | 15500 | |
| | | | | | | 15557 | 15572 | |
| | | | | | | 15615 | 15630 | |
| | | | | | | 15687 | 15702 | |
| | | | | | | 15817 | 15832 | |
| | | | | | | 15889 | 15904 | |
| | | | | | | 15947 | 15962 | |
| 547920 | 716 | 731 | GAGAACCCTGGCAACA | eekd₁₀kke | 52 | 26164 | 26179 | 1542 |
| 547921 | 717 | 732 | TGAGAACCCTGGCAAC | eekd₁₀kke | 43 | 26165 | 26180 | 1543 |
| 547922 | 722 | 737 | TGGAGTGAGAACCCTG | eekd₁₀kke | 79 | 26170 | 26185 | 1544 |
| 547923 | 725 | 740 | ATCTGGAGTGAGAACC | eekd₁₀kke | 68 | 26173 | 26188 | 1545 |
| 547924 | 742 | 757 | GTCCGACACACAAAAG | eekd₁₀kke | 53 | 26190 | 26205 | 1546 |
| 547925 | 743 | 758 | GGTCCGACACACAAAA | eekd₁₀kke | 16 | 26191 | 26206 | 1547 |
| 547927 | 745 | 760 | ATGGTCCGACACACAA | eekd₁₀kke | 79 | 26193 | 26208 | 1548 |
| 547928 | 746 | 761 | GATGGTCCGACACACA | eekd₁₀kke | 70 | 26194 | 26209 | 1549 |
| 547929 | 747 | 762 | AGATGGTCCGACACAC | eekd₁₀kke | 65 | 26195 | 26210 | 1550 |
| 547930 | 757 | 772 | TGATAGGTGCAGATGG | eekd₁₀kke | 48 | 26205 | 26220 | 1551 |
| 547931 | 758 | 773 | GTGATAGGTGCAGATG | eekd₁₀kke | 58 | 26206 | 26221 | 1552 |
| 547932 | 804 | 819 | CGATTTTCCATACATT | eekd₁₀kke | 33 | 26252 | 26267 | 1553 |
| 547933 | 805 | 820 | TCGATTTTCCATACAT | eekd₁₀kke | 44 | 26253 | 26268 | 1554 |
| 547934 | 806 | 821 | CTCGATTTTCCATACA | eekd₁₀kke | 38 | 26254 | 26269 | 1555 |
| 547935 | 807 | 822 | ACTCGATTTTCCATAC | eekd₁₀kke | 27 | 26255 | 26270 | 1556 |
| 547936 | 808 | 823 | GACTCGATTTTCCATA | eekd₁₀kke | 44 | 26256 | 26271 | 1557 |
| 547937 | 811 | 826 | TGTGACTCGATTTTCC | eekd₁₀kke | 56 | 26259 | 26274 | 1558 |
| 547938 | 812 | 827 | TTGTGACTCGATTTTC | eekd₁₀kke | 56 | 26260 | 26275 | 1559 |
| 547939 | 813 | 828 | TTTGTGACTCGATTTT | eekd₁₀kke | 70 | 26261 | 26276 | 1560 |
| 547940 | 817 | 832 | TTTCTTTGTGACTCGA | eekd₁₀kke | 71 | n/a | n/a | 1561 |
| 547941 | 852 | 867 | GTGTGCCACTTTCAGA | eekd₁₀kke | 66 | 27116 | 27131 | 1562 |
| 547942 | 853 | 868 | GGTGTGCCACTTTCAG | eekd₁₀kke | 85 | 27117 | 27132 | 1563 |
| 547943 | 854 | 869 | TGGTGTGCCACTTTCA | eekd₁₀kke | 83 | 27118 | 27133 | 1564 |
| 547944 | 857 | 872 | ACTTGGTGTGCCACTT | eekd₁₀kke | 54 | 27121 | 27136 | 1565 |
| 547945 | 858 | 873 | AACTTGGTGTGCCACT | eekd₁₀kke | 62 | 27122 | 27137 | 1566 |
| 547946 | 859 | 874 | GAACTTGGTGTGCCAC | eekd₁₀kke | 81 | 27123 | 27138 | 1567 |
| 547947 | 860 | 875 | GGAACTTGGTGTGCCA | eekd₁₀kke | 80 | 27124 | 27139 | 1568 |
| 547948 | 861 | 876 | AGGAACTTGGTGTGCC | eekd₁₀kke | 77 | 27125 | 27140 | 1569 |
| 547949 | 880 | 895 | GTGTTTTCTTGAGGAG | eekd₁₀kke | 6 | 27144 | 27159 | 1570 |
| 547950 | 881 | 896 | GGTGTTTTCTTGAGGA | eekd₁₀kke | 49 | 27145 | 27160 | 1571 |
| 547951 | 887 | 902 | AGATATGGTGTTTTCT | eekd₁₀kke | 25 | 27151 | 27166 | 1572 |
| 547952 | 888 | 903 | CAGATATGGTGTTTTC | eekd₁₀kke | 46 | 27152 | 27167 | 1573 |
| 547953 | 895 | 910 | CTATATCCAGATATGG | eekd₁₀kke | 16 | 27159 | 27174 | 1574 |
| 547954 | 902 | 917 | TAAAAGGCTATATCCA | eekd₁₀kke | 36 | 27166 | 27181 | 1575 |
| 547956 | 904 | 919 | GTTAAAAGGCTATATC | eekd₁₀kke | 13 | 27168 | 27183 | 1576 |
| 547957 | 905 | 920 | GGTTAAAAGGCTATAT | eekd₁₀kke | 6 | 27169 | 27184 | 1577 |
| 547958 | 907 | 922 | CAGGTTAAAAGGCTAT | eekd₁₀kke | 57 | 27171 | 27186 | 1578 |
| 547959 | 908 | 923 | GCAGGTTAAAAGGCTA | eekd₁₀kke | 60 | 27172 | 27187 | 1579 |
| 547960 | 909 | 924 | TGCAGGTTAAAAGGCT | eekd₁₀kke | 40 | 27173 | 27188 | 1580 |
| 547961 | 910 | 925 | TTGCAGGTTAAAAGGC | eekd₁₀kke | 5 | 27174 | 27189 | 1581 |
| 547962 | 911 | 926 | TTTGCAGGTTAAAAGG | eekd₁₀kke | 16 | 27175 | 27190 | 1582 |
| 547963 | 927 | 942 | GTTCAGGTAAAGTTCT | eekd₁₀kke | 22 | n/a | n/a | 1583 |
| 547964 | 928 | 943 | GGTTCAGGTAAAGTTC | eekd₁₀kke | 0 | n/a | n/a | 1584 |
| 547965 | 929 | 944 | GGGTTCAGGTAAAGTT | eekd₁₀kke | 29 | n/a | n/a | 1585 |
| 547966 | 930 | 945 | AGGGTTCAGGTAAAGT | eekd₁₀kke | 13 | n/a | n/a | 1586 |
| 547967 | 933 | 948 | GGCAGGGTTCAGGTAA | eekd₁₀kke | 25 | n/a | n/a | 1587 |
| 547968 | 940 | 955 | TTAGAATGGCAGGGTT | eekd₁₀kke | 37 | 27362 | 27377 | 1588 |
| 547969 | 953 | 968 | TCCCGGGTAAATTTTA | eekd₁₀kke | 0 | 27375 | 27390 | 1589 |
| 547970 | 954 | 969 | CTCCCGGGTAAATTTT | eekd₁₀kke | 42 | 27376 | 27391 | 1590 |
| 547972 | 958 | 973 | TCAACTCCCGGGTAAA | eekd₁₀kke | 49 | 27380 | 27395 | 1591 |
| 547973 | 961 | 976 | AAGTCAACTCCCGGGT | eekd₁₀kke | 62 | 27383 | 27398 | 1592 |
| 547974 | 962 | 977 | AAAGTCAACTCCCGGG | eekd₁₀kke | 52 | 27384 | 27399 | 1593 |
| 547975 | 963 | 978 | CAAAGTCAACTCCCGG | eekd₁₀kke | 44 | 27385 | 27400 | 1594 |
| 547976 | 964 | 979 | CCAAAGTCAACTCCCG | eekd₁₀kke | 49 | 27386 | 27401 | 1595 |
| 547977 | 967 | 982 | CCTCCAAAGTCAACTC | eekd₁₀kke | 57 | 27389 | 27404 | 1596 |
| 547978 | 1014 | 1029 | CTTGGCAAACATTCAC | eekd₁₀kke | 71 | 27436 | 27451 | 1597 |
| 547979 | 1018 | 1033 | GTCTCTTGGCAAACAT | eekd₁₀kke | 77 | 27440 | 27455 | 1598 |
| 547980 | 1020 | 1035 | AAGTCTCTTGGCAAAC | eekd₁₀kke | 54 | 27442 | 27457 | 1599 |
| 547981 | 1029 | 1044 | TCTTTGTGCAAGTCTC | eekd₁₀kke | 76 | 27451 | 27466 | 1600 |
| 547982 | 1034 | 1049 | AATCATCTTTGTGCAA | eekd₁₀kke | 54 | 27456 | 27471 | 1601 |
| 547983 | 1035 | 1050 | GAATCATCTTTGTGCA | eekd₁₀kke | 56 | 27457 | 27472 | 1602 |
| 547984 | 1036 | 1051 | CGAATCATCTTTGTGC | eekd₁₀kke | 55 | 27458 | 27473 | 1603 |
| 547985 | 1037 | 1052 | GCGAATCATCTTTGTG | eekd₁₀kke | 63 | 27459 | 27474 | 1604 |
| 547986 | 1039 | 1054 | CAGCGAATCATCTTTG | eekd₁₀kke | 63 | 27461 | 27476 | 1605 |
| 547987 | 1040 | 1055 | ACAGCGAATCATCTTT | eekd₁₀kke | 64 | 27462 | 27477 | 1606 |
| 547988 | 1042 | 1057 | TGACAGCGAATCATCT | eekd₁₀kke | 56 | 27464 | 27479 | 1607 |
| 547989 | 1043 | 1058 | CTGACAGCGAATCATC | eekd₁₀kke | 66 | 27465 | 27480 | 1608 |
| 547990 | 1044 | 1059 | ACTGACAGCGAATCAT | eekd₁₀kke | 58 | 27466 | 27481 | 1609 |
| 547991 | 1077 | 1092 | TACAGTCTTCTGGGAG | eekd₁₀kke | 0 | 27499 | 27514 | 1610 |
| 547992 | 1080 | 1095 | CCTTACAGTCTTCTGG | eekd₁₀kke | 17 | 27502 | 27517 | 1611 |
| 547993 | 1113 | 1128 | TAGATAATCTTAAGAA | eekd₁₀kke | 26 | 27634 | 27649 | 1612 |
| 547994 | 1120 | 1135 | CCATCCATAGATAATC | eekd₁₀kke | 53 | 27641 | 27656 | 1613 |
| 547995 | 1149 | 1164 | GTGTCCCATACGCAAT | eekd₁₀kke | 64 | 27670 | 27685 | 1614 |
| 547996 | 1150 | 1165 | TGTGTCCCATACGCAA | eekd₁₀kke | 65 | 27671 | 27686 | 1615 |

TABLE 145

| | SEQ | SEQ | | | | SEQ | SEQ | |
|---|---|---|---|---|---|---|---|---|
| | ID | ID | | | | ID | ID | |
| | NO: | NO: | | | | NO: | NO: | |
| | 1 | 1 | | | % | 10 | 10 | SEQ |
| | Start | Stop | | | inhi- | Start | Stop | ID |
| ISIS NO | Site | Site | Sequence | Chemistry | bition | Site | Site | NO |
| 531231 | n/a | n/a | TATCACTGTACTAGTT | eeeeed₁₀eeeee | 0 | 14744 | 14763 | 334 |
| | | | TCCT | | | 14815 | 14834 | |
| | | | | | | 14886 | 14905 | |
| | | | | | | 14945 | 14964 | |
| | | | | | | 15005 | 15024 | |
| | | | | | | 15077 | 15096 | |
| | | | | | | 15220 | 15239 | |
| | | | | | | 15292 | 15311 | |
| | | | | | | 15351 | 15370 | |
| | | | | | | 15411 | 15430 | |
| | | | | | | 15483 | 15502 | |
| | | | | | | 15555 | 15574 | |
| | | | | | | 15613 | 15632 | |
| | | | | | | 15685 | 15704 | |
| | | | | | | 15815 | 15834 | |
| | | | | | | 15887 | 15906 | |
| | | | | | | 15945 | 15964 | |
| 547747 | n/a | n/a | TCACTGTACTAGTTTC | eekd₁₀kke | 80 | 14746 | 14761 | 1267 |
| | | | | | | 14817 | 14832 | |
| | | | | | | 14888 | 14903 | |
| | | | | | | 14947 | 14962 | |
| | | | | | | 15007 | 15022 | |
| | | | | | | 15079 | 15094 | |
| | | | | | | 15222 | 15237 | |
| | | | | | | 15294 | 15309 | |
| | | | | | | 15353 | 15368 | |
| | | | | | | 15413 | 15428 | |
| | | | | | | 15485 | 15500 | |
| | | | | | | 15557 | 15572 | |
| | | | | | | 15615 | 15630 | |
| | | | | | | 15687 | 15702 | |
| | | | | | | 15817 | 15832 | |
| | | | | | | 15889 | 15904 | |
| | | | | | | 15947 | 15962 | |
| 547997 | 1151 | 1166 | TTGTGTCCCATACGCA | eekd₁₀kke | 89 | 27672 | 27687 | 1616 |
| 547998 | 1152 | 1167 | CTTGTGTCCCATACGC | eekd₁₀kke | 82 | 27673 | 27688 | 1617 |
| 547999 | 1153 | 1168 | CCTTGTGTCCCATACG | eekd₁₀kke | 50 | 27674 | 27689 | 1618 |
| 548000 | 1154 | 1169 | CCCTTGTGTCCCATAC | eekd₁₀kke | 54 | 27675 | 27690 | 1619 |
| 548001 | 1163 | 1178 | ACCAGAGCTCCCTTGT | eekd₁₀kke | 64 | 27684 | 27699 | 1620 |
| 548002 | 1164 | 1179 | AACCAGAGCTCCCTTG | eekd₁₀kke | 56 | 27685 | 27700 | 1621 |
| 548003 | 1165 | 1180 | TAACCAGAGCTCCCTT | eekd₁₀kke | 66 | 27686 | 27701 | 1622 |
| 548004 | 1167 | 1182 | AGTAACCAGAGCTCCC | eekd₁₀kke | 80 | 27688 | 27703 | 1623 |
| 548005 | 1169 | 1184 | AGAGTAACCAGAGCTC | eekd₁₀kke | 77 | 27690 | 27705 | 1624 |
| 548006 | 1172 | 1187 | CAAAGAGTAACCAGAG | eekd₁₀kke | 54 | 27693 | 27708 | 1625 |
| 548007 | 1174 | 1189 | CTCAAAGAGTAACCAG | eekd₁₀kke | 70 | 27695 | 27710 | 1626 |
| 548008 | 1175 | 1190 | TCTCAAAGAGTAACCA | eekd₁₀kke | 71 | 27696 | 27711 | 1627 |
| 548009 | 1184 | 1199 | GTTACACAATCTCAAA | eekd₁₀kke | 47 | 27705 | 27720 | 1628 |
| 548010 | 1187 | 1202 | AGTGTTACACAATCTC | eekd₁₀kke | 80 | 27708 | 27723 | 1629 |
| 548011 | 1189 | 1204 | CCAGTGTTACACAATC | eekd₁₀kke | 14 | 27710 | 27725 | 1630 |
| 548012 | 1192 | 1207 | TCCCCAGTGTTACACA | eekd₁₀kke | 3 | 27713 | 27728 | 1631 |
| 548013 | 1193 | 1208 | GTCCCCAGTGTTACAC | eekd₁₀kke | 37 | 27714 | 27729 | 1632 |
| 548014 | 1194 | 1209 | TGTCCCCAGTGTTACA | eekd₁₀kke | 31 | 27715 | 27730 | 1633 |
| 548015 | 1195 | 1210 | TTGTCCCCAGTGTTAC | eekd₁₀kke | 50 | 27716 | 27731 | 1634 |
| 548016 | 1248 | 1263 | AAGAGTTTGTTCCTCC | eekd₁₀kke | 55 | 27924 | 27939 | 1635 |
| 548017 | 1252 | 1267 | CAAGAAGAGTTTGTTC | eekd₁₀kke | 3 | 27928 | 27943 | 1636 |
| 548018 | 1253 | 1268 | CCAAGAAGAGTTTGTT | eekd₁₀kke | 22 | 27929 | 27944 | 1637 |
| 548019 | 1255 | 1270 | CCCCAAGAAGAGTTTG | eekd₁₀kke | 24 | 27931 | 27946 | 1638 |
| 548020 | 1256 | 1271 | TCCCCAAGAAGAGTTT | eekd₁₀kke | 76 | 27932 | 27947 | 1639 |
| 548021 | 1261 | 1276 | CACTCTCCCCAAGAAG | eekd₁₀kke | 0 | 27937 | 27952 | 1640 |
| 548022 | 1262 | 1277 | CCACTCTCCCCAAGAA | eekd₁₀kke | 69 | 27938 | 27953 | 1641 |
| 548023 | 1290 | 1305 | GCTTCACCTGCAGGCT | eekd₁₀kke | 58 | 27966 | 27981 | 1642 |
| 548024 | 1297 | 1312 | GCTGTCAGCTTCACCT | eekd₁₀kke | 79 | 27973 | 27988 | 1643 |
| 548025 | 1300 | 1315 | TGAGCTGTCAGCTTCA | eekd₁₀kke | 66 | 27976 | 27991 | 1644 |
| 548026 | 1332 | 1347 | GTCCTATGAGTGACCC | eekd₁₀kke | 52 | 28008 | 28023 | 1645 |
| 548027 | 1334 | 1349 | GTGTCCTATGAGTGAC | eekd₁₀kke | 18 | 28010 | 28025 | 1646 |
| 548028 | 1335 | 1350 | GGTGTCCTATGAGTGA | eekd₁₀kke | 38 | 28011 | 28026 | 1647 |
| 548029 | 1336 | 1351 | TGGTGTCCTATGAGTG | eekd₁₀kke | 12 | 28012 | 28027 | 1648 |
| 548030 | 1337 | 1352 | CTGGTGTCCTATGAGT | eekd₁₀kke | 52 | 28013 | 28028 | 1649 |
| 548031 | 1397 | 1412 | GATGCGCCAAACATCC | eekd₁₀kke | 73 | 30475 | 30490 | 1650 |
| 548032 | 1398 | 1413 | AGATGCGCCAAACATC | eekd₁₀kke | 51 | 30476 | 30491 | 1651 |
| 548034 | 1400 | 1415 | ATAGATGCGCCAAACA | eekd₁₀kke | 31 | 30478 | 30493 | 1652 |
| 548035 | 1404 | 1419 | CACTATAGATGCGCCA | eekd₁₀kke | 44 | 30482 | 30497 | 1653 |
| 548036 | 1405 | 1420 | CCACTATAGATGCGCC | eekd₁₀kke | 74 | 30483 | 30498 | 1654 |
| 548037 | 1427 | 1442 | AATGTCTGACAGATTT | eekd₁₀kke | 70 | 30505 | 30520 | 1655 |
| 548038 | 1428 | 1443 | TAATGTCTGACAGATT | eekd₁₀kke | 67 | 30506 | 30521 | 1656 |
| 548039 | 1445 | 1460 | GAAAGGTGTATCTTTT | eekd₁₀kke | 29 | 30523 | 30538 | 1657 |
| 548040 | 1449 | 1464 | GTGAGAAAGGTGTATC | eekd₁₀kke | 62 | 30527 | 30542 | 1658 |
| 548041 | 1450 | 1465 | TGTGAGAAAGGTGTAT | eekd₁₀kke | 64 | 30528 | 30543 | 1659 |
| 548042 | 1452 | 1467 | TTTGTGAGAAAGGTGT | eekd₁₀kke | 63 | 30530 | 30545 | 1660 |
| 548043 | 1453 | 1468 | ATTTGTGAGAAAGGTG | eekd₁₀kke | 76 | 30531 | 30546 | 1661 |
| 548044 | 1474 | 1489 | TGGTGAATAATAATCT | eekd₁₀kke | 12 | 30552 | 30567 | 1662 |
| 548045 | 1483 | 1498 | TTATAGTTTTGGTGAA | eekd₁₀kke | 0 | 30561 | 30576 | 1663 |
| 548046 | 1506 | 1521 | TATCATGATTCCCTTC | eekd₁₀kke | 84 | 30584 | 30599 | 1664 |
| 548047 | 1508 | 1523 | GATATCATGATTCCCT | eekd₁₀kke | 83 | 30586 | 30601 | 1665 |
| 548048 | 1509 | 1524 | CGATATCATGATTCCC | eekd₁₀kke | 84 | 30587 | 30602 | 1666 |
| 548049 | 1510 | 1525 | GCGATATCATGATTCC | eekd₁₀kke | 62 | 30588 | 30603 | 1667 |
| 548050 | 1512 | 1527 | AGGCGATATCATGATT | eekd₁₀kke | 37 | 30590 | 30605 | 1668 |
| 548051 | 1513 | 1528 | AAGGCGATATCATGAT | eekd₁₀kke | 61 | 30591 | 30606 | 1669 |
| 548052 | 1535 | 1550 | CAAAGGAGCCTGGAGT | eekd₁₀kke | 43 | 30613 | 30628 | 1670 |
| 548053 | 1538 | 1553 | ATTCAAAGGAGCCTGG | eekd₁₀kke | 36 | 30616 | 30631 | 1671 |
| 548054 | 1539 | 1554 | AATTCAAAGGAGCCTG | eekd₁₀kke | 45 | 30617 | 30632 | 1672 |
| 548055 | 1541 | 1556 | GTAATTCAAAGGAGCC | eekd₁₀kke | 78 | 30619 | 30634 | 1673 |
| 548056 | 1543 | 1558 | GTGTAATTCAAAGGAG | eekd₁₀kke | 40 | 30621 | 30636 | 1674 |
| 548057 | 1564 | 1579 | CATATTGGTTTTTGGA | eekd₁₀kke | 49 | 31870 | 31885 | 1675 |
| 548058 | 1565 | 1580 | GCATATTGGTTTTTGG | eekd₁₀kke | 71 | 31871 | 31886 | 1676 |
| 548059 | 1568 | 1583 | TAGGCATATTGGTTTT | eekd₁₀kke | 50 | 31874 | 31889 | 1677 |
| 548060 | 1588 | 1603 | CTTGTGTCACCTTTGG | eekd₁₀kke | 76 | 31894 | 31909 | 1678 |
| 548061 | 1589 | 1604 | GCTTGTGTCACCTTTG | eekd₁₀kke | 86 | 31895 | 31910 | 1679 |
| 548062 | 1598 | 1613 | ATAAATTGTGCTTGTG | eekd₁₀kke | 19 | 31904 | 31919 | 1680 |
| 548063 | 1600 | 1615 | GTATAAATTGTGCTTG | eekd₁₀kke | 35 | 31906 | 31921 | 1681 |
| 548064 | 1602 | 1617 | TGGTATAAATTGTGCT | eekd₁₀kke | 54 | 31908 | 31923 | 1682 |
| 548065 | 1603 | 1618 | TTGGTATAAATTGTGC | eekd₁₀kke | 22 | 31909 | 31924 | 1683 |
| 548067 | 1606 | 1621 | CAGTTGGTATAAATTG | eekd₁₀kke | 18 | 31912 | 31927 | 1684 |
| 548068 | 1609 | 1624 | CAACAGTTGGTATAAA | eekd₁₀kke | 0 | 31915 | 31930 | 1685 |
| 548069 | 1610 | 1625 | CCAACAGTTGGTATAA | eekd₁₀kke | 57 | 31916 | 31931 | 1686 |
| 548070 | 1611 | 1626 | CCCAACAGTTGGTATA | eekd₁₀kke | 85 | 31917 | 31932 | 1687 |
| 548071 | 1629 | 1644 | AGAAGCCCCATCCGGT | eekd₁₀kke | 55 | 31935 | 31950 | 1688 |
| 548072 | 1640 | 1655 | TTTCTCCTTCGAGAAG | eekd₁₀kke | 33 | 31946 | 31961 | 1689 |
| 548073 | 1641 | 1656 | CTTTCTCCTTCGAGAA | eekd₁₀kke | 24 | 31947 | 31962 | 1690 |

TABLE 146

| | SEQ | SEQ | | | | SEQ | SEQ | |
|---|---|---|---|---|---|---|---|---|
| | ID | ID | | | | ID | ID | |
| | NO: | NO: | | | | NO: | NO: | |
| | 1 | 1 | | | | 10 | 10 | SEQ |
| ISIS | Start | Stop | | | % | Start | Stop | ID |
| NO | Site | Site | Sequence | Chemistry | inhibition | Site | Site | NO |
| 531231 | n/a | n/a | TATCACTGTACTAGTTTCCT | eeeeed₁₀eeeee | 19 | 14744 | 14763 | 334 |
| | | | | | | 14815 | 14834 | |
| | | | | | | 14886 | 14905 | |
| | | | | | | 14945 | 14964 | |
| | | | | | | 15005 | 15024 | |
| | | | | | | 15077 | 15096 | |
| | | | | | | 15220 | 15239 | |
| | | | | | | 15292 | 15311 | |
| | | | | | | 15351 | 15370 | |
| | | | | | | 15411 | 15430 | |
| | | | | | | 15483 | 15502 | |
| | | | | | | 15555 | 15574 | |
| | | | | | | 15613 | 15632 | |
| | | | | | | 15685 | 15704 | |
| | | | | | | 15815 | 15834 | |
| | | | | | | 15887 | 15906 | |
| | | | | | | 15945 | 15964 | |
| 547747 | n/a | n/a | TCACTGTACTAGTTTC | eekd₁₀kke | 66 | 14746 | 14761 | 1267 |
| | | | | | | 14817 | 14832 | |
| | | | | | | 14888 | 14903 | |
| | | | | | | 14947 | 14962 | |
| | | | | | | 15007 | 15022 | |
| | | | | | | 15079 | 15094 | |
| | | | | | | 15222 | 15237 | |
| | | | | | | 15294 | 15309 | |
| | | | | | | 15353 | 15368 | |
| | | | | | | 15413 | 15428 | |
| | | | | | | 15485 | 15500 | |
| | | | | | | 15557 | 15572 | |
| | | | | | | 15615 | 15630 | |
| | | | | | | 15687 | 15702 | |
| | | | | | | 15817 | 15832 | |
| | | | | | | 15889 | 15904 | |
| | | | | | | 15947 | 15962 | |
| 548151 | 2139 | 2154 | GGGCTTCAGCCAGACA | eekd₁₀kke | 35 | 34238 | 34253 | 1691 |
| 548152 | 2140 | 2155 | CGGGCTTCAGCCAGAC | eekd₁₀kke | 32 | 34239 | 34254 | 1692 |
| 548153 | 2149 | 2164 | TGCTGAAAGCGGGCTT | eekd₁₀kke | 44 | 34248 | 34263 | 1693 |
| 548154 | 2150 | 2165 | GTGCTGAAAGCGGGCT | eekd₁₀kke | 7 | 34249 | 34264 | 1694 |
| 548155 | 2151 | 2166 | CGTGCTGAAAGCGGGC | eekd₁₀kke | 76 | 34250 | 34265 | 1695 |
| 548156 | 2168 | 2183 | TCAGCCCCTGGTTACG | eekd₁₀kke | 0 | 34267 | 34282 | 1696 |
| 548157 | 2172 | 2187 | ATTGTCAGCCCCTGGT | eekd₁₀kke | 7 | 34271 | 34286 | 1697 |
| 548158 | 2174 | 2189 | GCATTGTCAGCCCCTG | eekd₁₀kke | 18 | 34273 | 34288 | 1698 |
| 548159 | 2175 | 2190 | CGCATTGTCAGCCCCT | eekd₁₀kke | 59 | 34274 | 34289 | 1699 |
| 548160 | 2176 | 2191 | TCGCATTGTCAGCCCC | eekd₁₀kke | 60 | 34275 | 34290 | 1700 |
| 548161 | 2177 | 2192 | CTCGCATTGTCAGCCC | eekd₁₀kke | 59 | 34276 | 34291 | 1701 |
| 548162 | 2178 | 2193 | CCTCGCATTGTCAGCC | eekd₁₀kke | 25 | 34277 | 34292 | 1702 |
| 548163 | 2179 | 2194 | ACCTCGCATTGTCAGC | eekd₁₀kke | 46 | 34278 | 34293 | 1703 |
| 548164 | 2180 | 2195 | GACCTCGCATTGTCAG | eekd₁₀kke | 40 | 34279 | 34294 | 1704 |
| 548165 | 2181 | 2196 | CGACCTCGCATTGTCA | eekd₁₀kke | 53 | 34280 | 34295 | 1705 |
| 548166 | 2182 | 2197 | GCGACCTCGCATTGTC | eekd₁₀kke | 0 | 34281 | 34296 | 1706 |
| 548167 | 2183 | 2198 | TGCGACCTCGCATTGT | eekd₁₀kke | 36 | 34282 | 34297 | 1707 |
| 548168 | 2184 | 2199 | TTGCGACCTCGCATTG | eekd₁₀kke | 61 | 34283 | 34298 | 1708 |
| 548169 | 2185 | 2200 | GTTGCGACCTCGCATT | eekd₁₀kke | 7 | 34284 | 34299 | 1709 |
| 548170 | 2186 | 2201 | AGTTGCGACCTCGCAT | eekd₁₀kke | 68 | 34285 | 34300 | 1710 |
| 548171 | 2187 | 2202 | CAGTTGCGACCTCGCA | eekd₁₀kke | 47 | 34286 | 34301 | 1711 |
| 548172 | 2188 | 2203 | TCAGTTGCGACCTCGC | eekd₁₀kke | 0 | 34287 | 34302 | 1712 |
| 548173 | 2189 | 2204 | CTCAGTTGCGACCTCG | eekd₁₀kke | 51 | 34288 | 34303 | 1713 |
| 548174 | 2190 | 2205 | TCTCAGTTGCGACCTC | eekd₁₀kke | 68 | 34289 | 34304 | 1714 |
| 548175 | 2191 | 2206 | ATCTCAGTTGCGACCT | eekd₁₀kke | 0 | 34290 | 34305 | 1715 |
| 548176 | 2192 | 2207 | GATCTCAGTTGCGACC | eekd₁₀kke | 38 | 34291 | 34306 | 1716 |
| 548177 | 2193 | 2208 | AGATCTCAGTTGCGAC | eekd₁₀kke | 45 | 34292 | 34307 | 1717 |
| 548178 | 2194 | 2209 | GAGATCTCAGTTGCGA | eekd₁₀kke | 54 | 34293 | 34308 | 1718 |
| 548179 | 2195 | 2210 | GGAGATCTCAGTTGCG | eekd₁₀kke | 52 | 34294 | 34309 | 1719 |
| 548180 | 2199 | 2214 | TCATGGAGATCTCAGT | eekd₁₀kke | 79 | 34298 | 34313 | 1720 |
| 548181 | 2200 | 2215 | GTCATGGAGATCTCAG | eekd₁₀kke | 55 | 34299 | 34314 | 1721 |
| 548182 | 2201 | 2216 | AGTCATGGAGATCTCA | eekd₁₀kke | 55 | 34300 | 34315 | 1722 |
| 548183 | 2202 | 2217 | CAGTCATGGAGATCTC | eekd₁₀kke | 43 | 34301 | 34316 | 1723 |
| 548184 | 2203 | 2218 | ACAGTCATGGAGATCT | eekd₁₀kke | 73 | 34302 | 34317 | 1724 |
| 548185 | 2208 | 2223 | AACACACAGTCATGGA | eekd₁₀kke | 23 | 34307 | 34322 | 1725 |
| 548186 | 2209 | 2224 | CAACACACAGTCATGG | eekd₁₀kke | 0 | 34308 | 34323 | 1726 |
| 548187 | n/a | n/a | CATCCTATCCGTGTTC | eekd₁₀kke | 33 | 3279 | 3294 | 1727 |
| 548189 | n/a | n/a | CATGAACATCCTATCC | eekd₁₀kke | 24 | 3285 | 3300 | 1728 |
| 548190 | n/a | n/a | TATTCCATGAACATCC | eekd₁₀kke | 43 | 3290 | 3305 | 1729 |
| 548191 | n/a | n/a | GTCAACATATTCCATG | eekd₁₀kke | 0 | 3297 | 3312 | 1730 |
| 548192 | n/a | n/a | CCTGTCAACATATTCC | eekd₁₀kke | 65 | 3300 | 3315 | 1731 |
| 548193 | n/a | n/a | TGTCCTGTCAACATAT | eekd₁₀kke | 58 | 3303 | 3318 | 1732 |
| 548194 | n/a | n/a | GCCAACAGTTTCAACT | eekd₁₀kke | 61 | 3322 | 3337 | 1733 |
| 548195 | n/a | n/a | TTCTGCCAACAGTTTC | eekd₁₀kke | 84 | 3326 | 3341 | 1734 |
| 548196 | n/a | n/a | CAATATTGACTTTGGG | eekd₁₀kke | 6 | 3343 | 3358 | 1735 |
| 548197 | n/a | n/a | TGCTTGGCTTCAATAT | eekd₁₀kke | 68 | 3353 | 3368 | 1736 |
| 548198 | n/a | n/a | ACTGCAGGCAATATTT | eekd₁₀kke | 49 | 3369 | 3384 | 1737 |
| 548199 | n/a | n/a | GCACTGCAGGCAATAT | eekd₁₀kke | 24 | 3371 | 3386 | 1738 |
| 548200 | n/a | n/a | CTAATGTGGCACTGCA | eekd₁₀kke | 19 | 3379 | 3394 | 1739 |
| 548201 | n/a | n/a | TGTTCTAATGTGGCAC | eekd₁₀kke | 67 | 3383 | 3398 | 1740 |
| 548202 | n/a | n/a | GCTGTTCTAATGTGGC | eekd₁₀kke | 9 | 3385 | 3400 | 1741 |
| 548203 | n/a | n/a | TGACTAGTGAATGGCT | eekd₁₀kke | 73 | 2280 | 2295 | 1742 |
| 548204 | n/a | n/a | TCTGACTAGTGAATGG | eekd₁₀kke | 25 | 2282 | 2297 | 1743 |
| 548205 | n/a | n/a | TCAATCTGACTAGTGA | eekd₁₀kke | 14 | 2286 | 2301 | 1744 |
| 548206 | n/a | n/a | GGTCAATCTGACTAGT | eekd₁₀kke | 45 | 2288 | 2303 | 1745 |
| 548207 | n/a | n/a | CTGGTCAATCTGACTA | eekd₁₀kke | 60 | 2290 | 2305 | 1746 |
| 548208 | n/a | n/a | CTCTGGTCAATCTGAC | eekd₁₀kke | 19 | 2292 | 2307 | 1747 |
| 548209 | n/a | n/a | CAATCTCTGGTCAATC | eekd₁₀kke | 57 | 2296 | 2311 | 1748 |
| 548210 | n/a | n/a | CAACAATCTCTGGTCA | eekd₁₀kke | 55 | 2299 | 2314 | 1749 |
| 548211 | n/a | n/a | ACCAACAATCTCTGGT | eekd₁₀kke | 51 | 2301 | 2316 | 1750 |
| 548212 | n/a | n/a | AGCCCACCAACAATCT | eekd₁₀kke | 44 | 2306 | 2321 | 1751 |
| 548213 | n/a | n/a | GACAGCCCACCAACAA | eekd₁₀kke | 70 | 2309 | 2324 | 1752 |
| 548214 | n/a | n/a | CAGACAGCCCACCAAC | eekd₁₀kke | 55 | 2311 | 2326 | 1753 |
| 548215 | n/a | n/a | GCATAGACCCCAACAG | eekd₁₀kke | 61 | 2324 | 2339 | 1754 |
| 548216 | n/a | n/a | GTGCATAGACCCCAAC | eekd₁₀kke | 45 | 2326 | 2341 | 1755 |
| 548217 | n/a | n/a | CTGTGCATAGACCCCA | eekd₁₀kke | 69 | 2328 | 2343 | 1756 |
| 548218 | n/a | n/a | TCCTGTGCATAGACCC | eekd₁₀kke | 59 | 2330 | 2345 | 1757 |
| 548219 | n/a | n/a | GAAATCCTGTGCATAG | eekd₁₀kke | 8 | 2334 | 2349 | 1758 |
| 548220 | n/a | n/a | GCAGAAATCCTGTGCA | eekd₁₀kke | 69 | 2337 | 2352 | 1759 |
| 548221 | n/a | n/a | ACTCCAGCAGAAATCC | eekd₁₀kke | 49 | 2343 | 2358 | 1760 |
| 548222 | n/a | n/a | AATCATGCCTTGTGGG | eekd₁₀kke | 32 | 4765 | 4780 | 1761 |
| 548223 | n/a | n/a | TAGACCCAGAATCATG | eekd₁₀kke | 50 | 4774 | 4789 | 1762 |
| 548224 | n/a | n/a | CCATAGACCCAGAATC | eekd₁₀kke | 20 | 4777 | 4792 | 1763 |
| 548225 | n/a | n/a | AGTCACCATAGACCCA | eekd₁₀kke | 48 | 4782 | 4797 | 1764 |
| 548226 | n/a | n/a | TAAGTCACCATAGACC | eekd₁₀kke | 39 | 4784 | 4799 | 1765 |
| 548227 | n/a | n/a | GTGGCCCTCTTAAGTC | eekd₁₀kke | 0 | 4794 | 4809 | 1766 |

TABLE 147

| | SEQ | SEQ | | | | SEQ | SEQ | |
|---|---|---|---|---|---|---|---|---|
| | ID | ID | | | | ID | ID | |
| | NO: | NO: | | | | NO: | NO: | |
| | 1 | 1 | | | | 10 | 10 | SEQ |
| ISIS | Start | Stop | | | % | Start | Stop | ID |
| NO | Site | Site | Sequence | Chemistry | inhibition | Site | Site | NO |
| 531231 | n/a | n/a | TATCACTGTACTAGTTTCCT | eeeeed₁₀eeeee | 42 | 14744 | 14763 | 334 |
| | | | | | | 14815 | 14834 | |
| | | | | | | 14886 | 14905 | |
| | | | | | | 14945 | 14964 | |
| | | | | | | 15005 | 15024 | |
| | | | | | | 15077 | 15096 | |
| | | | | | | 15220 | 15239 | |
| | | | | | | 15292 | 15311 | |
| | | | | | | 15351 | 15370 | |
| | | | | | | 15411 | 15430 | |
| | | | | | | 15483 | 15502 | |
| | | | | | | 15555 | 15574 | |
| | | | | | | 15613 | 15632 | |
| | | | | | | 15685 | 15704 | |
| | | | | | | 15815 | 15834 | |
| | | | | | | 15887 | 15906 | |
| | | | | | | 15945 | 15964 | |
| 547747 | n/a | n/a | TCACTGTACTAGTTTC | eekd₁₀kke | 80 | 14746 | 14761 | 1267 |
| | | | | | | 14817 | 14832 | |
| | | | | | | 14888 | 14903 | |
| | | | | | | 14947 | 14962 | |
| | | | | | | 15007 | 15022 | |
| | | | | | | 15079 | 15094 | |
| | | | | | | 15222 | 15237 | |
| | | | | | | 15294 | 15309 | |
| | | | | | | 15353 | 15368 | |
| | | | | | | 15413 | 15428 | |
| | | | | | | 15485 | 15500 | |
| | | | | | | 15557 | 15572 | |
| | | | | | | 15615 | 15630 | |
| | | | | | | 15687 | 15702 | |
| | | | | | | 15817 | 15832 | |
| | | | | | | 15889 | 15904 | |
| | | | | | | 15947 | 15962 | |
| 548228 | n/a | n/a | GTTGTGTGGCCCTCTT | eekd₁₀kke | 37 | 4799 | 4814 | 1767 |
| 548229 | n/a | n/a | CATTGTTGTGTGGCCC | eekd₁₀kke | 31 | 4803 | 4818 | 1768 |
| 548230 | n/a | n/a | TACTCATTGTTGTGTG | eekd₁₀kke | 10 | 4807 | 4822 | 1769 |
| 548231 | n/a | n/a | AATACTCATTGTTGTG | eekd₁₀kke | 11 | 4809 | 4824 | 1770 |
| 548232 | n/a | n/a | GCCATACATCTGAGGA | eekd₁₀kke | 3 | 4831 | 4846 | 1771 |
| 548233 | n/a | n/a | ATTGTAGCCATACATC | eekd₁₀kke | 38 | 4837 | 4852 | 1772 |
| 548234 | n/a | n/a | TTATTGTAGCCATACA | eekd₁₀kke | 17 | 4839 | 4854 | 1773 |
| 548235 | n/a | n/a | TCTAGATGACCTGAAG | eekd₁₀kke | 0 | 18147 | 18162 | 1774 |
| 548236 | n/a | n/a | TACATCTAGATGACCT | eekd₁₀kke | 37 | 18151 | 18166 | 1775 |
| 548237 | n/a | n/a | GTATACATCTAGATGA | eekd₁₀kke | 22 | 18154 | 18169 | 1776 |
| 548238 | n/a | n/a | ACTCGCCTTTGTGACT | eekd₁₀kke | 31 | 26268 | 26283 | 1777 |
| 548239 | n/a | n/a | TACTCGCCTTTGTGAC | eekd₁₀kke | 18 | 26269 | 26284 | 1778 |
| 548240 | n/a | n/a | ATACTCGCCTTTGTGA | eekd₁₀kke | 3 | 26270 | 26285 | 1779 |
| | | | | | | 26301 | 26316 | |
| 548241 | n/a | n/a | CATACTCGCCTTTGTG | eekd₁₀kke | 1 | 26271 | 26286 | 1780 |
| | | | | | | 26302 | 26317 | |
| 548242 | n/a | n/a | GCATACTCGCCTTTGT | eekd₁₀kke | 25 | 26272 | 26287 | 1781 |
| | | | | | | 26303 | 26318 | |
| 548243 | n/a | n/a | ATGCATACTCGCCTTT | eekd₁₀kke | 0 | 26274 | 26289 | 1782 |
| | | | | | | 26305 | 26320 | |
| 548244 | n/a | n/a | CATGCATACTCGCCTT | eekd₁₀kke | 51 | 26275 | 26290 | 1783 |
| | | | | | | 26306 | 26321 | |
| 548245 | n/a | n/a | CCATGCATACTCGCCT | eekd₁₀kke | 31 | 26276 | 26291 | 1784 |
| | | | | | | 26307 | 26322 | |
| 548246 | n/a | n/a | TTCCATGCATACTCGC | eekd₁₀kke | 46 | 26278 | 26293 | 1785 |
| 548247 | n/a | n/a | CGATTTTCCATGCATA | eekd₁₀kke | 56 | 26283 | 26298 | 1786 |
| 548248 | n/a | n/a | TGCGATTTTCCATGCA | eekd₁₀kke | 13 | 26285 | 26300 | 1787 |
| 548249 | n/a | n/a | TGTGATGCGATTTTCC | eekd₁₀kke | 22 | 26290 | 26305 | 1788 |
| 548250 | n/a | n/a | CTTTGTGATGCGATTT | eekd₁₀kke | 0 | 26293 | 26308 | 1789 |
| 548251 | n/a | n/a | GCCTTTGTGATGCGAT | eekd₁₀kke | 13 | 26295 | 26310 | 1790 |
| 548252 | n/a | n/a | ACTCGCCTTTGTGATG | eekd₁₀kke | 33 | 26299 | 26314 | 1791 |
| 548253 | n/a | n/a | TACTCGCCTTTGTGAT | eekd₁₀kke | 8 | 26300 | 26315 | 1792 |
| 548254 | n/a | n/a | CCCATGCATACTCGCC | eekd₁₀kke | 39 | 26308 | 26323 | 1793 |
| 548255 | n/a | n/a | CCCCATGCATACTCGC | eekd₁₀kke | 38 | 26309 | 26324 | 1794 |
| 548256 | n/a | n/a | GCTCCCCATGCATACT | eekd₁₀kke | 25 | 26312 | 26327 | 1795 |
| 548257 | n/a | n/a | AGTGCTCCCCATGCAT | eekd₁₀kke | 2 | 26315 | 26330 | 1796 |
| 548258 | n/a | n/a | CAAGTGCTCCCCATGC | eekd₁₀kke | 0 | 26317 | 26332 | 1797 |
| 548259 | n/a | n/a | GTGATGAAAGTACAGC | eekd₁₀kke | 45 | 26335 | 26350 | 1798 |
| 548260 | n/a | n/a | AGGAGTTTGTCAGAAC | eekd₁₀kke | 28 | 3210 | 3225 | 1799 |
| 548261 | n/a | n/a | TTCAGGGAGTGATGTC | eekd₁₀kke | 36 | 3241 | 3256 | 1800 |
| 548262 | n/a | n/a | CCTATCCGTGTTCAGC | eekd₁₀kke | 73 | 3276 | 3291 | 1801 |
| 548263 | n/a | n/a | CTCTACATACTCAGGA | eekd₁₀kke | 62 | 3561 | 3576 | 1802 |
| 548264 | n/a | n/a | CAGTCCAAAAATCCCT | eekd₁₀kke | 60 | 3701 | 3716 | 1803 |
| 548265 | n/a | n/a | CCTCTTGATTTGGGCA | eekd₁₀kke | 85 | 3749 | 3764 | 1804 |
| 548266 | n/a | n/a | TTGGCCAACTCTGTGG | eekd₁₀kke | 44 | 3816 | 3831 | 1805 |
| 548267 | n/a | n/a | GACCTCCAGACTACTG | eekd₁₀kke | 34 | 3848 | 3863 | 1806 |
| 548268 | n/a | n/a | TGTGTCTAGGGAGTTG | eekd₁₀kke | 52 | 3898 | 3913 | 1807 |
| 548269 | n/a | n/a | AGCACACAATTACTGG | eekd₁₀kke | 62 | 3946 | 3961 | 1808 |
| 548270 | n/a | n/a | CTGCTGGTTTTAGACC | eekd₁₀kke | 28 | 4029 | 4044 | 1809 |
| 548271 | n/a | n/a | TTCACTTACCACAGGA | eekd₁₀kke | 56 | 4122 | 4137 | 1810 |
| 548272 | n/a | n/a | GGTGCCACTTGCTTGG | eekd₁₀kke | 54 | 4178 | 4193 | 1811 |
| 548273 | n/a | n/a | AATCTCCACCCCCGAA | eekd₁₀kke | 5 | 4224 | 4239 | 1812 |
| 548274 | n/a | n/a | TACCTGACAAGTGGTC | eekd₁₀kke | 0 | 4287 | 4302 | 1813 |
| 548275 | n/a | n/a | GTCCCAAGACATTCCT | eekd₁₀kke | 40 | 4350 | 4365 | 1814 |
| 548276 | n/a | n/a | CAGAGTGTCATCTGCG | eekd₁₀kke | 49 | 4389 | 4404 | 1815 |
| 548277 | n/a | n/a | GGATTGGACCCAGACA | eekd₁₀kke | 57 | 4511 | 4526 | 1816 |
| 548278 | n/a | n/a | GGTTCCCTAGCGGTCC | eekd₁₀kke | 74 | 4564 | 4579 | 1817 |
| 548279 | n/a | n/a | CACCTAGAACTATCCA | eekd₁₀kke | 39 | 4632 | 4647 | 1818 |
| 548280 | n/a | n/a | CTCCCTCTGTAATGAT | eekd₁₀kke | 43 | 4736 | 4751 | 1819 |
| 548281 | n/a | n/a | GGTTGAGGGACAGACA | eekd₁₀kke | 0 | 4944 | 4959 | 1820 |
| 548282 | n/a | n/a | GTGGGTTTGCACATGG | eekd₁₀kke | 73 | 4992 | 5007 | 1821 |
| 548283 | n/a | n/a | GGCTTATGCTCCTTCT | eekd₁₀kke | 56 | 5017 | 5032 | 1822 |
| 548284 | n/a | n/a | CCCCCTGTAGTTGGCT | eekd₁₀kke | 35 | 5051 | 5066 | 1823 |
| 548285 | n/a | n/a | GCTTACTTACATCCCT | eekd₁₀kke | 52 | 5132 | 5147 | 1824 |
| 548286 | n/a | n/a | GGGACTACATGCAATA | eekd₁₀kke | 47 | 5166 | 5181 | 1825 |
| 548287 | n/a | n/a | GTCAAAGAGTGTCCAC | eekd₁₀kke | 38 | 5283 | 5298 | 1826 |
| 548288 | n/a | n/a | GAATAGCAAGCTCCAA | eekd₁₀kke | 64 | 5348 | 5363 | 1827 |
| 548289 | n/a | n/a | CATGATACCACACCAC | eekd₁₀kke | 28 | 5484 | 5499 | 1828 |
| 548290 | n/a | n/a | GAGCACTCTTATTAGC | eekd₁₀kke | 31 | 5546 | 5561 | 1829 |
| 548291 | n/a | n/a | CCTGTTAGAGTTGGCC | eekd₁₀kke | 35 | 5576 | 5591 | 1830 |
| 548292 | n/a | n/a | AGGACACTGTTTCCAG | eekd₁₀kke | 38 | 5627 | 5642 | 1831 |
| 548293 | n/a | n/a | GTCACCAGAACCACAT | eekd₁₀kke | 44 | 5683 | 5698 | 1832 |
| 548294 | n/a | n/a | GTGTGCACTTTCTGGT | eekd₁₀kke | 33 | 5716 | 5731 | 1833 |
| 548295 | n/a | n/a | CTCTGATTGGGTCACC | eekd₁₀kke | 26 | 5746 | 5761 | 1834 |
| 548296 | n/a | n/a | ACCAACAACTCAGGCC | eekd₁₀kke | 34 | 5858 | 5873 | 1835 |
| 548297 | n/a | n/a | ACTCTCAAGCTCCACG | eekd₁₀kke | 32 | 5889 | 5904 | 1836 |
| 548298 | n/a | n/a | GGACAATATGTCTCCT | eekd₁₀kke | 0 | 5935 | 5950 | 1837 |
| 548299 | n/a | n/a | CATTGTGCTCAACTGA | eekd₁₀kke | 35 | 5961 | 5976 | 1838 |
| 548300 | n/a | n/a | GCCCATGGTGAATCTG | eekd₁₀kke | 53 | 5995 | 6010 | 1839 |
| 548301 | n/a | n/a | CCTAGTACAAAGTGGC | eekd₁₀kke | 65 | 6050 | 6065 | 1840 |
| 548302 | n/a | n/a | GCCATTTTATCCCTGA | eekd₁₀kke | 71 | 6134 | 6149 | 1841 |
| 548303 | n/a | n/a | GGGCCCCCATGTCCAT | eekd₁₀kke | 0 | 6336 | 6351 | 1842 |

TABLE 148

| | SEQ | SEQ | | | | SEQ | SEQ | |
|---|---|---|---|---|---|---|---|---|
| | ID | ID | | | | ID | ID | |
| | NO: | NO: | | | | NO: | NO: | |
| | 1 | 1 | | | % | 10 | 10 | SEQ |
| | Start | Stop | | | inhi- | Start | Stop | ID |
| ISIS NO | Site | Site | Sequence | Chemistry | bition | Site | Site | NO |
| 531231 | n/a | n/a | TATCACTGTACTAGTT | eeeeed₁₀eeeee | 72 | 14744 | 14763 | 334 |
| | | | TCCT | | | 14815 | 14834 | |
| | | | | | | 14886 | 14905 | |
| | | | | | | 14945 | 14964 | |
| | | | | | | 15005 | 15024 | |
| | | | | | | 15077 | 15096 | |
| | | | | | | 15220 | 15239 | |
| | | | | | | 15292 | 15311 | |
| | | | | | | 15351 | 15370 | |
| | | | | | | 15411 | 15430 | |
| | | | | | | 15483 | 15502 | |
| | | | | | | 15555 | 15574 | |
| | | | | | | 15613 | 15632 | |
| | | | | | | 15685 | 15704 | |
| | | | | | | 15815 | 15834 | |
| | | | | | | 15887 | 15906 | |
| | | | | | | 15945 | 15964 | |
| 547747 | n/a | n/a | TCACTGTACTAGTTTC | eekd₁₀kke | 67 | 14746 | 14761 | 1267 |
| | | | | | | 14817 | 14832 | |
| | | | | | | 14888 | 14903 | |
| | | | | | | 14947 | 14962 | |
| | | | | | | 15007 | 15022 | |
| | | | | | | 15079 | 15094 | |
| | | | | | | 15222 | 15237 | |
| | | | | | | 15294 | 15309 | |
| | | | | | | 15353 | 15368 | |
| | | | | | | 15413 | 15428 | |
| | | | | | | 15485 | 15500 | |
| | | | | | | 15557 | 15572 | |
| | | | | | | 15615 | 15630 | |
| | | | | | | 15687 | 15702 | |
| | | | | | | 15817 | 15832 | |
| | | | | | | 15889 | 15904 | |
| | | | | | | 15947 | 15962 | |
| 548305 | n/a | n/a | GTTCTTGCTTATCCTC | eekd₁₀kke | 55 | 6484 | 6499 | 1843 |
| 548306 | n/a | n/a | ATGTGACAGTCAGGGA | eekd₁₀kke | 8 | 6559 | 6574 | 1844 |
| 548307 | n/a | n/a | TTCTGCAACTGAGCCT | eekd₁₀kke | 6 | 6587 | 6602 | 1845 |
| 548308 | n/a | n/a | AATGGCAGGTCCTGGC | eekd₁₀kke | 9 | 6616 | 6631 | 1846 |
| 548309 | n/a | n/a | AGACAGTTGGTGGTTT | eekd₁₀kke | 41 | 6700 | 6715 | 1847 |
| 548310 | n/a | n/a | GAGGAGTTGGTTTAGT | eekd₁₀kke | 0 | 6750 | 6765 | 1848 |
| 548311 | n/a | n/a | TGACCACCTCTCGGGT | eekd₁₀kke | 10 | 6860 | 6875 | 1849 |
| 548312 | n/a | n/a | ATTTGGCCCTGAGCCC | eekd₁₀kke | 0 | 6935 | 6950 | 1850 |
| 548313 | n/a | n/a | GCCTTTGAGGGAGTGG | eekd₁₀kke | 35 | 7024 | 7039 | 1851 |
| 548314 | n/a | n/a | ACAACCTGTCCATTCC | eekd₁₀kke | 43 | 7087 | 7102 | 1852 |
| 548315 | n/a | n/a | GTTGTCAACTGGGACC | eekd₁₀kke | 14 | 7125 | 7140 | 1853 |
| 548316 | n/a | n/a | CTGTTCAGGTAGCACA | eekd₁₀kke | 64 | 7150 | 7165 | 1854 |
| 548317 | n/a | n/a | CCGGGAAAGACTGTCT | eekd₁₀kke | 42 | 7190 | 7205 | 1855 |
| 548318 | n/a | n/a | ACTGCACCCCACATAT | eekd₁₀kke | 18 | 7257 | 7272 | 1856 |
| 548319 | n/a | n/a | CCTCATCTCAGTATGA | eekd₁₀kke | 26 | 7398 | 7413 | 1857 |
| 548320 | n/a | n/a | GCACACAGACTTGCCC | eekd₁₀kke | 0 | 7508 | 7523 | 1858 |
| 548321 | n/a | n/a | CTGCATCTGGACTATG | eekd₁₀kke | 38 | 7559 | 7574 | 1859 |
| 548322 | n/a | n/a | AGGGAAATTAGAGGCA | eekd₁₀kke | 38 | 7586 | 7601 | 1860 |
| 548323 | n/a | n/a | CTGTTGCCTGACATGC | eekd₁₀kke | 43 | 7696 | 7711 | 1861 |
| 548324 | n/a | n/a | ACATAAATTCCCCACA | eekd₁₀kke | 29 | 7741 | 7756 | 1862 |
| 548325 | n/a | n/a | CCCACTGACTGACTAC | eekd₁₀kke | 27 | 7906 | 7921 | 1863 |
| 548326 | n/a | n/a | TCCTGTGACAGAACCA | eekd₁₀kke | 27 | 7988 | 8003 | 1864 |
| 548327 | n/a | n/a | CTACACCTTTCTGCAC | eekd₁₀kke | 6 | 8221 | 8236 | 1865 |
| 548328 | n/a | n/a | GGTCCTTGAACCCCGT | eekd₁₀kke | 68 | 8260 | 8275 | 1866 |
| 548329 | n/a | n/a | AGCAGATCTGGGTTGT | eekd₁₀kke | 59 | 8328 | 8343 | 1867 |
| 548330 | n/a | n/a | GACTAGCTTCTACTAC | eekd₁₀kke | 34 | 8404 | 8419 | 1868 |
| 548331 | n/a | n/a | ACAATCCCTTAGCCCA | eekd₁₀kke | 73 | 8457 | 8472 | 1869 |
| 548332 | n/a | n/a | GATGAAATGTGCACCT | eekd₁₀kke | 46 | 8491 | 8506 | 1870 |
| 548333 | n/a | n/a | GACTGTGCTATCCGCT | eekd₁₀kke | 58 | 8550 | 8565 | 1871 |
| 548334 | n/a | n/a | GCTCACTATAGGCCCC | eekd₁₀kke | 69 | 8656 | 8671 | 1872 |
| 548335 | n/a | n/a | TAGCATCATGCCACAG | eekd₁₀kke | 51 | 8684 | 8699 | 1873 |
| 548336 | n/a | n/a | GCACATTAGGAGGTAG | eekd₁₀kke | 1 | 9039 | 9054 | 1874 |
| 548337 | n/a | n/a | TACCGCTGGGTGCGGT | eekd₁₀kke | 10 | 9075 | 9090 | 1875 |
| 548338 | n/a | n/a | ATGAAACTGTGGCTCG | eekd₁₀kke | 80 | 9131 | 9146 | 1876 |
| 548339 | n/a | n/a | ACATGTGGGATCAGAG | eekd₁₀kke | 37 | 9275 | 9290 | 1877 |
| 548340 | n/a | n/a | GATGATCCTCACATAC | eekd₁₀kke | 35 | 9316 | 9331 | 1878 |
| 548341 | n/a | n/a | TAGAACCTTCCTCCAC | eekd₁₀kke | 30 | 9341 | 9356 | 1879 |
| 548342 | n/a | n/a | GGAAGACTTCCCTCTG | eekd₁₀kke | 0 | 9403 | 9418 | 1880 |
| 548343 | n/a | n/a | TAGTGATAAGAGCTGG | eekd₁₀kke | 78 | 9472 | 9487 | 1881 |
| 548344 | n/a | n/a | GGCAACTATGTTCTCA | eekd₁₀kke | 76 | 9536 | 9551 | 1882 |
| 548345 | n/a | n/a | CTAACTCCATCACTGC | eekd₁₀kke | 55 | 9637 | 9652 | 1883 |
| 548346 | n/a | n/a | TCCCCAATACTTGCTG | eekd₁₀kke | 35 | 9696 | 9711 | 1884 |
| 548347 | n/a | n/a | GCTGTTCTAAGCGAGA | eekd₁₀kke | 31 | 9976 | 9991 | 1885 |
| 548348 | n/a | n/a | TGAGTGATGCCTTCCA | eekd₁₀kke | 82 | 10024 | 10039 | 1886 |
| 548349 | n/a | n/a | TCCAGAATACTGCCCC | eekd₁₀kke | 61 | 10054 | 10069 | 1887 |
| 548350 | n/a | n/a | GCGCTAACCTCATAAA | eekd₁₀kke | 29 | 10148 | 10163 | 1888 |
| 548351 | n/a | n/a | CTGGAAACGAGACACA | eekd₁₀kke | 33 | 10201 | 10216 | 1889 |
| 548352 | n/a | n/a | GAGAGAGATGTTCCCT | eekd₁₀kke | 47 | 10240 | 10255 | 1890 |
| 548353 | n/a | n/a | CTGCTGGTTGAGAATC | eekd₁₀kke | 48 | 10287 | 10302 | 1891 |
| 548354 | n/a | n/a | ATGTCCCCAGTGGAAG | eekd₁₀kke | 41 | 10314 | 10329 | 1892 |
| 548355 | n/a | n/a | GCATCCTCCCTAGTTG | eekd₁₀kke | 47 | 10362 | 10377 | 1893 |
| 548356 | n/a | n/a | TGTTGGTCAGCATTCA | eekd₁₀kke | 63 | 10411 | 10426 | 1894 |
| 548357 | n/a | n/a | GACGACTGCCCTGTGC | eekd₁₀kke | 69 | 10436 | 10451 | 1895 |
| 548358 | n/a | n/a | ATTTGGGCCTAGTGGT | eekd₁₀kke | 0 | 10515 | 10530 | 1896 |
| 548359 | n/a | n/a | CCTAGTCCTCAAGTTT | eekd₁₀kke | 0 | 10580 | 10595 | 1897 |
| 548360 | n/a | n/a | CAAGACATCAGTAGCT | eekd₁₀kke | 45 | 10626 | 10641 | 1898 |
| 548361 | n/a | n/a | CTTATCAGTCCCAGTC | eekd₁₀kke | 52 | 10702 | 10717 | 1899 |
| 548362 | n/a | n/a | GACAACCCATCAGTTG | eekd₁₀kke | 33 | 10742 | 10757 | 1900 |
| 548363 | n/a | n/a | CAGCAGGCTCAAAGTG | eekd₁₀kke | 37 | 10915 | 10930 | 1901 |
| 548364 | n/a | n/a | TGGCTAAGTCAGGCCC | eekd₁₀kke | 30 | 10982 | 10997 | 1902 |
| 548365 | n/a | n/a | TGTACTCCACCTCACG | eekd₁₀kke | 55 | 11017 | 11032 | 1903 |
| 548366 | n/a | n/a | AGCAAGCTAAGTGAGT | eekd₁₀kke | 5 | 11199 | 11214 | 1904 |
| 548367 | n/a | n/a | GTTCTTGAGTGTAGAG | eekd₁₀kke | 52 | 11260 | 11275 | 1905 |
| 548368 | n/a | n/a | GTGTTCATACGGAAGC | eekd₁₀kke | 59 | 11299 | 11314 | 1906 |
| 548369 | n/a | n/a | GTTGGGATGCGACTCT | eekd₁₀kke | 50 | 11335 | 11350 | 1907 |
| 548370 | n/a | n/a | ACGAAGTCTCTTTCCT | eekd₁₀kke | 53 | 11385 | 11400 | 1908 |
| 548371 | n/a | n/a | CGATGAGTTGGGCAGG | eekd₁₀kke | 57 | 11454 | 11469 | 1909 |
| 548372 | n/a | n/a | GATACCTTTCCACTCC | eekd₁₀kke | 61 | 11558 | 11573 | 1910 |
| 548373 | n/a | n/a | TCCCCAAGATTATGTG | eekd₁₀kke | 16 | 11596 | 11611 | 1911 |
| 548374 | n/a | n/a | GCACCCTTTTCATTGA | eekd₁₀kke | 41 | 12074 | 12089 | 1912 |
| 548375 | n/a | n/a | TCGACTTCTCCTGTCT | eekd₁₀kke | 27 | 12199 | 12214 | 1913 |
| 548376 | n/a | n/a | GCCTTTGACCTTTCGC | eekd₁₀kke | 65 | 12261 | 12276 | 1914 |
| 548377 | n/a | n/a | GTGTGCTGAGGTTTGC | eekd₁₀kke | 80 | 12297 | 12312 | 1915 |
| 548378 | n/a | n/a | GCAAGATGCATGCAGC | eekd₁₀kke | 49 | 12393 | 12408 | 1916 |
| 548379 | n/a | n/a | ATCGAACTCTGCTTGA | eekd₁₀kke | 44 | 12477 | 12492 | 1917 |
| 548380 | n/a | n/a | GCCCAGTTTTGGCAAC | eekd₁₀kke | 7 | 12540 | 12555 | 1918 |
| 548381 | n/a | n/a | CCCACTACCATTTGGG | eekd₁₀kke | 0 | 12578 | 12593 | 1919 |

TABLE 149

| | SEQ | SEQ | | | | SEQ | SEQ | |
|---|---|---|---|---|---|---|---|---|
| | ID | ID | | | | ID | ID | |
| | NO: | NO: | | | | NO: | NO: | |
| | 1 | 1 | | | % | 10 | 10 | SEQ |
| | Start | Stop | | | inhi- | Start | Stop | ID |
| ISIS NO | Site | Site | Sequence | Chemistry | bition | Site | Site | NO |
| 531231 | n/a | n/a | TATCACTGTACTAGTT | eeeeed₁₀eeeee | 46 | 14744 | 14763 | 334 |
| | | | TCCT | | | 14815 | 14834 | |
| | | | | | | 14886 | 14905 | |
| | | | | | | 14945 | 14964 | |
| | | | | | | 15005 | 15024 | |
| | | | | | | 15077 | 15096 | |
| | | | | | | 15220 | 15239 | |
| | | | | | | 15292 | 15311 | |
| | | | | | | 15351 | 15370 | |
| | | | | | | 15411 | 15430 | |
| | | | | | | 15483 | 15502 | |
| | | | | | | 15555 | 15574 | |
| | | | | | | 15613 | 15632 | |
| | | | | | | 15685 | 15704 | |
| | | | | | | 15815 | 15834 | |
| | | | | | | 15887 | 15906 | |
| | | | | | | 15945 | 15964 | |
| 547747 | n/a | n/a | TCACTGTACTAGTTTC | eekd₁₀kke | 64 | 14746 | 14761 | 1267 |
| | | | | | | 14817 | 14832 | |
| | | | | | | 14888 | 14903 | |
| | | | | | | 14947 | 14962 | |
| | | | | | | 15007 | 15022 | |
| | | | | | | 15079 | 15094 | |
| | | | | | | 15222 | 15237 | |
| | | | | | | 15294 | 15309 | |
| | | | | | | 15353 | 15368 | |
| | | | | | | 15413 | 15428 | |
| | | | | | | 15485 | 15500 | |
| | | | | | | 15557 | 15572 | |
| | | | | | | 15615 | 15630 | |
| | | | | | | 15687 | 15702 | |
| | | | | | | 15817 | 15832 | |
| | | | | | | 15889 | 15904 | |
| | | | | | | 15947 | 15962 | |
| 548459 | n/a | n/a | CAACTATAACAGTATC | eekd₁₀kke | 26 | 15903 | 15918 | 1920 |
| 548460 | n/a | n/a | CTATACCACGGTAACT | eekd₁₀kke | 0 | 16036 | 16051 | 1921 |
| 548461 | n/a | n/a | CCTATATCACTGTAAC | eekd₁₀kke | 0 | 16127 | 16142 | 1922 |
| 548462 | n/a | n/a | ACCTATATCACTGTAA | eekd₁₀kke | 0 | 16128 | 16143 | 1923 |
| 548463 | n/a | n/a | TCACTGTACCTATATC | eekd₁₀kke | 0 | 16135 | 16150 | 1924 |
| 548464 | n/a | n/a | GTCCTATAACTATATC | eekd₁₀kke | 0 | 16174 | 16189 | 1925 |
| 548465 | n/a | n/a | CTGTACCTATAACTGT | eekd₁₀kke | 0 | 16202 | 16217 | 1926 |
| 548466 | n/a | n/a | CGTCACTGTACCTATA | eekd₁₀kke | 71 | 16207 | 16222 | 1927 |
| 548467 | n/a | n/a | CATCACTGTACCTATA | eekd₁₀kke | 20 | 16258 | 16273 | 1928 |
| 548468 | n/a | n/a | CAACATCACTGTACCT | eekd₁₀kke | 6 | 16261 | 16276 | 1929 |
| 548469 | n/a | n/a | TTCCCTACCCCTGGTA | eekd₁₀kke | 0 | 16331 | 16346 | 1930 |
| 548470 | n/a | n/a | GGTGGAATGTCATGGC | eekd₁₀kke | 56 | 16404 | 16419 | 1931 |
| 548471 | n/a | n/a | GCGGAAAACTGGCCGT | eekd₁₀kke | 17 | 16474 | 16489 | 1932 |
| 548472 | n/a | n/a | CCCAATACAGGGCCAG | eekd₁₀kke | 0 | 16513 | 16528 | 1933 |
| 548473 | n/a | n/a | CCAACCTTCCCAATCT | eekd₁₀kke | 0 | 16554 | 16569 | 1934 |
| 548474 | n/a | n/a | GAAGGTGTGCTGTCGC | eekd₁₀kke | 33 | 16602 | 16617 | 1935 |
| 548475 | n/a | n/a | ATCGAGTCCTGCCTCC | eekd₁₀kke | 17 | 16707 | 16722 | 1936 |
| 548476 | n/a | n/a | GCAAATCCTTCCAGCA | eekd₁₀kke | 27 | 16755 | 16770 | 1937 |
| 548477 | n/a | n/a | GCACGAGCTTGCCTGT | eekd₁₀kke | 26 | 16787 | 16802 | 1938 |
| 548478 | n/a | n/a | GAGCCATCCAGGGTGC | eekd₁₀kke | 53 | 16845 | 16860 | 1939 |
| 548479 | n/a | n/a | AGGCCATTTGATCCGA | eekd₁₀kke | 68 | 16913 | 16928 | 1940 |
| 548480 | n/a | n/a | GCCACGCCCTTAGCAG | eekd₁₀kke | 20 | 16973 | 16988 | 1941 |
| 548481 | n/a | n/a | GTTCCCTGAGGAACGG | eekd₁₀kke | 2 | 17010 | 17025 | 1942 |
| 548482 | n/a | n/a | GGCAGTTAGGCCAGGA | eekd₁₀kke | 53 | 17068 | 17083 | 1943 |
| 548483 | n/a | n/a | CTACAGATCATCCCTA | eekd₁₀kke | 5 | 17102 | 17117 | 1944 |
| 548484 | n/a | n/a | CCCCGGAGCACCTTCA | eekd₁₀kke | 41 | 17207 | 17222 | 1945 |
| 548485 | n/a | n/a | GTGACCCAAGGGTCGA | eekd₁₀kke | 17 | 17252 | 17267 | 1946 |
| 548486 | n/a | n/a | CGTGGTTAGCCTGACA | eekd₁₀kke | 68 | 17416 | 17431 | 1947 |
| 548487 | n/a | n/a | TCCATGTCAGAGTTGC | eekd₁₀kke | 71 | 17461 | 17476 | 1948 |
| 548488 | n/a | n/a | CCTCCTTTTGGCTTGA | eekd₁₀kke | 63 | 17530 | 17545 | 1949 |
| 548489 | n/a | n/a | TTCCCCAGAGGTGATA | eekd₁₀kke | 16 | 17582 | 17597 | 1950 |
| 548490 | n/a | n/a | TCTGGTTAGCCTCCGA | eekd₁₀kke | 58 | 17664 | 17679 | 1951 |
| 548491 | n/a | n/a | TGGCCAAGCAACCAGT | eekd₁₀kke | 57 | 17715 | 17730 | 1952 |
| 548492 | n/a | n/a | GCCCAATGTCCTAACC | eekd₁₀kke | 51 | 17794 | 17809 | 1953 |
| 548493 | n/a | n/a | CCACCGCTGCCCGCCA | eekd₁₀kke | 37 | 18013 | 18028 | 1954 |
| 548494 | n/a | n/a | TGTGACCCCCCACCGC | eekd₁₀kke | 39 | 18022 | 18037 | 1955 |
| 548495 | n/a | n/a | TTGTGACCCCCCACCG | eekd₁₀kke | 55 | 18023 | 18038 | 1956 |
| 548496 | n/a | n/a | ACTGAACCCCCTTAGG | eekd₁₀kke | 0 | 18571 | 18586 | 1957 |
| 548497 | n/a | n/a | CCTTCATACCCCTCAC | eekd₁₀kke | 26 | 18725 | 18740 | 1958 |
| 548498 | n/a | n/a | CCGATAACAGACCGGC | eekd₁₀kke | 71 | 18795 | 18810 | 1959 |
| 548499 | n/a | n/a | ATACCCGGAGTCAGGA | eekd₁₀kke | 56 | 18955 | 18970 | 1960 |
| 548500 | n/a | n/a | ATTGCTCAGGCCCCCT | eekd₁₀kke | 29 | 19037 | 19052 | 1961 |
| 548501 | n/a | n/a | CAAGCCACTAACCCAC | eekd₁₀kke | 33 | 19147 | 19162 | 1962 |
| 548502 | n/a | n/a | AATTCTTGGACCAAGG | eekd₁₀kke | 25 | 19234 | 19249 | 1963 |
| 548503 | n/a | n/a | CCATCTACTCCCCCAT | eekd₁₀kke | 9 | 19291 | 19306 | 1964 |
| 548504 | n/a | n/a | GCAGCGAGCATTCCAA | eekd₁₀kke | 28 | 19352 | 19367 | 1965 |
| 548505 | n/a | n/a | GGACAATGCCTATGCT | eekd₁₀kke | 21 | 19386 | 19401 | 1966 |
| 548506 | n/a | n/a | GAAGCCATTCACTGCA | eekd₁₀kke | 32 | 19436 | 19451 | 1967 |
| 548507 | n/a | n/a | AAACTCCTCTCAAGGC | eekd₁₀kke | 53 | 19474 | 19489 | 1968 |
| 548508 | n/a | n/a | GCACCACCATGCGGTT | eekd₁₀kke | 43 | 19553 | 19568 | 1969 |
| 548509 | n/a | n/a | TGCAGGGCTGCGCAGT | eekd₁₀kke | 41 | 19960 | 19975 | 1970 |
| 548510 | n/a | n/a | TTAGCCACTCCTCTTG | eekd₁₀kke | 30 | 20062 | 20077 | 1971 |
| 548511 | n/a | n/a | AGCTAGCTGACCCCAA | eekd₁₀kke | 16 | 20092 | 20107 | 1972 |
| 548512 | n/a | n/a | TCCGCCTTTGGATACT | eekd₁₀kke | 49 | 20155 | 20170 | 1973 |
| 548513 | n/a | n/a | CCTGCTGATTGTGTCT | eekd₁₀kke | 16 | 20240 | 20255 | 1974 |
| 548514 | n/a | n/a | TCGAGGACAGCCCCCA | eekd₁₀kke | 40 | 20335 | 20350 | 1975 |
| 548515 | n/a | n/a | ACCCGTCAGCCTCAGC | eekd₁₀kke | 59 | 20381 | 20396 | 1976 |
| 548516 | n/a | n/a | CTTGCCTATTCACCCC | eekd₁₀kke | 49 | 20544 | 20559 | 1977 |
| 548517 | n/a | n/a | CGGACAAGCCTTACAG | eekd₁₀kke | 43 | 20596 | 20611 | 1978 |
| 548518 | n/a | n/a | CACACTTACCCCGCTC | eekd₁₀kke | 12 | 20741 | 20756 | 1979 |
| 548519 | n/a | n/a | CCTCCCCTTGTGTGTC | eekd₁₀kke | 31 | 20843 | 20858 | 1980 |
| 548520 | n/a | n/a | CCGCTTCCCTGACTGT | eekd₁₀kke | 43 | 20919 | 20934 | 1981 |
| 548521 | n/a | n/a | CAGCTCCCTTACTAGG | eekd₁₀kke | 61 | 20958 | 20973 | 1982 |
| 548522 | n/a | n/a | AGGTATTGACCGCCAG | eekd₁₀kke | 55 | 21062 | 21077 | 1983 |
| 548523 | n/a | n/a | GGTAAATCCATCCCCT | eekd₁₀kke | 44 | 21157 | 21172 | 1984 |
| 548524 | n/a | n/a | GCCCGATCACCTTAGA | eekd₁₀kke | 45 | 21220 | 21235 | 1985 |
| 548525 | n/a | n/a | GTCTAACTGGCCTGGC | eekd₁₀kke | 2 | 21328 | 21343 | 1986 |
| 548526 | n/a | n/a | CTAAGCTGTGTCTCAT | eekd₁₀kke | 26 | 21373 | 21388 | 1987 |
| 548527 | n/a | n/a | TGTTTCAAGTGCCAGA | eekd₁₀kke | 50 | 21434 | 21449 | 1988 |
| 548528 | n/a | n/a | TGCAGTGGTCAAGCAT | eekd₁₀kke | 32 | 21478 | 21493 | 1989 |
| 548529 | n/a | n/a | GCGATTCCTTGCCTCT | eekd₁₀kke | 56 | 21554 | 21569 | 1990 |
| 548530 | n/a | n/a | ATAATAGAGGCAGCCA | eekd₁₀kke | 50 | 21592 | 21607 | 1991 |
| 548531 | n/a | n/a | GTCAGAAGGCCTCTTA | eekd₁₀kke | 21 | 21753 | 21768 | 1992 |
| 548532 | n/a | n/a | TATTTATCCGACCTCT | eekd₁₀kke | 34 | 21881 | 21896 | 1993 |
| 548533 | n/a | n/a | GAGGTGGTTGGAGCTA | eekd₁₀kke | 9 | 21926 | 21941 | 1994 |
| 548534 | n/a | n/a | CAGATCCCAATTCTTC | eekd₁₀kke | 22 | 22063 | 22078 | 1995 |
| 548535 | n/a | n/a | GAGTCTTTCCAATCCT | eekd₁₀kke | 13 | 22142 | 22157 | 1996 |

TABLE 150

| | SEQ | SEQ | | | | SEQ | SEQ | |
|---|---|---|---|---|---|---|---|---|
| | ID | ID | | | | ID | ID | |
| | NO: | NO: | | | | NO: | NO: | |
| | 1 | 1 | | | % | 10 | 10 | SEQ |
| | Start | Stop | | | inhi- | Start | Stop | ID |
| ISIS NO | Site | Site | Sequence | Chemistry | bition | Site | Site | NO |
| 531231 | n/a | n/a | TATCACTGTACTAGTT | eeeeed₁₀eeeee | 46 | 14744 | 14763 | 334 |
| | | | TCCT | | | 14815 | 14834 | |
| | | | | | | 14886 | 14905 | |
| | | | | | | 14945 | 14964 | |
| | | | | | | 15005 | 15024 | |
| | | | | | | 15077 | 15096 | |
| | | | | | | 15220 | 15239 | |
| | | | | | | 15292 | 15311 | |
| | | | | | | 15351 | 15370 | |
| | | | | | | 15411 | 15430 | |
| | | | | | | 15483 | 15502 | |
| | | | | | | 15555 | 15574 | |
| | | | | | | 15613 | 15632 | |
| | | | | | | 15685 | 15704 | |
| | | | | | | 15815 | 15834 | |
| | | | | | | 15887 | 15906 | |
| | | | | | | 15945 | 15964 | |
| 547747 | n/a | n/a | TCACTGTACTAGTTTC | eekd₁₀kke | 64 | 14746 | 14761 | 1267 |
| | | | | | | 14817 | 14832 | |
| | | | | | | 14888 | 14903 | |
| | | | | | | 14947 | 14962 | |
| | | | | | | 15007 | 15022 | |
| | | | | | | 15079 | 15094 | |
| | | | | | | 15222 | 15237 | |
| | | | | | | 15294 | 15309 | |
| | | | | | | 15353 | 15368 | |
| | | | | | | 15413 | 15428 | |
| | | | | | | 15485 | 15500 | |
| | | | | | | 15557 | 15572 | |
| | | | | | | 15615 | 15630 | |
| | | | | | | 15687 | 15702 | |
| | | | | | | 15817 | 15832 | |
| | | | | | | 15889 | 15904 | |
| | | | | | | 15947 | 15962 | |
| 548536 | n/a | n/a | TCTCAATCCCAACCCC | eekd₁₀kke | 0 | 22168 | 22183 | 1997 |
| 548537 | n/a | n/a | CCTCAATCCCAACCCA | eekd₁₀kke | 0 | 22191 | 22206 | 1998 |
| 548538 | n/a | n/a | TAGTGGCAAGAACCAC | eekd₁₀kke | 0 | 22627 | 22642 | 1999 |
| 548539 | n/a | n/a | CGCGCGAATGCCTGCC | eekd₁₀kke | 41 | 22658 | 22673 | 2000 |
| 548540 | n/a | n/a | GACACCTGCTTGATTA | eekd₁₀kke | 7 | 22704 | 22719 | 2001 |
| 548541 | n/a | n/a | GGCACTGGTCATGGAC | eekd₁₀kke | 39 | 22760 | 22775 | 2002 |
| 548542 | n/a | n/a | GCGCCATCCTTCAATC | eekd₁₀kke | 7 | 22857 | 22872 | 2003 |
| 548543 | n/a | n/a | GATCCACCCATGACCT | eekd₁₀kke | 32 | 22997 | 23012 | 2004 |
| 548544 | n/a | n/a | GCTGTGACTCAGATCA | eekd₁₀kke | 62 | 23070 | 23085 | 2005 |
| 548545 | n/a | n/a | CTCTTCGCATGGACAC | eekd₁₀kke | 46 | 23100 | 23115 | 2006 |
| 548546 | n/a | n/a | GCCCAAGCCTACATGC | eekd₁₀kke | 35 | 23430 | 23445 | 2007 |
| 548547 | n/a | n/a | GTGCGATTAAGCCCCA | eekd₁₀kke | 86 | 23514 | 23529 | 2008 |
| 548548 | n/a | n/a | GCTTGTAGAAGGGATT | eekd₁₀kke | 54 | 23631 | 23646 | 2009 |
| 548549 | n/a | n/a | TGTGCAATCAGGTGGA | eekd₁₀kke | 56 | 23765 | 23780 | 2010 |
| 548550 | n/a | n/a | CCGGCCTGGATACAGC | eekd₁₀kke | 0 | 23831 | 23846 | 2011 |
| 548551 | n/a | n/a | CGGCCAATGGGAAAGG | eekd₁₀kke | 25 | 24175 | 24190 | 2012 |
| 548552 | n/a | n/a | TGGAGGAGTAGGGAAT | eekd₁₀kke | 10 | 24200 | 24215 | 2013 |
| 548553 | n/a | n/a | CCCGAAGAGTCAAGTC | eekd₁₀kke | 46 | 24255 | 24270 | 2014 |
| 548554 | n/a | n/a | GTGCTGCATTGCATGA | eekd₁₀kke | 42 | 24290 | 24305 | 2015 |
| 548555 | n/a | n/a | ACACGCCAGGTGAAAA | eekd₁₀kke | 2 | 24322 | 24337 | 2016 |
| 548556 | n/a | n/a | ATGCATGCCTACCCAA | eekd₁₀kke | 43 | 24526 | 24541 | 2017 |
| 548557 | n/a | n/a | GTTACTCTGTGATCCA | eekd₁₀kke | 81 | 24581 | 24596 | 2018 |
| 548558 | n/a | n/a | AACATTGTGTAGCTGC | eekd₁₀kke | 75 | 24640 | 24655 | 2019 |
| 548559 | n/a | n/a | GAGACTGAAGCCCTCA | eekd₁₀kke | 44 | 24676 | 24691 | 2020 |
| 548560 | n/a | n/a | CACTGCCTAGAAAGGC | eekd₁₀kke | 16 | 24734 | 24749 | 2021 |
| 548561 | n/a | n/a | TGTAGTATCCAGAGTA | eekd₁₀kke | 46 | 24930 | 24945 | 2022 |
| 548562 | n/a | n/a | AGATGACCTGCAGATG | eekd₁₀kke | 50 | 24983 | 24998 | 2023 |
| 548563 | n/a | n/a | AAACCATGAATTAGGT | eekd₁₀kke | 20 | 25100 | 25115 | 2024 |
| 548564 | n/a | n/a | TTGCTACTTTACACCA | eekd₁₀kke | 69 | 25208 | 25223 | 2025 |
| 548565 | n/a | n/a | GGCATTAGGATAGGCA | eekd₁₀kke | 63 | 25350 | 25365 | 2026 |
| 548566 | n/a | n/a | CACTCAGACTGTCTGA | eekd₁₀kke | 0 | 25413 | 25428 | 2027 |
| 548567 | n/a | n/a | AGATCCGGAATAACCA | eekd₁₀kke | 67 | 25459 | 25474 | 2028 |
| 548568 | n/a | n/a | ATTGACAACCATCCTA | eekd₁₀kke | 27 | 25496 | 25511 | 2029 |
| 548569 | n/a | n/a | ACTCATTGGTCTACAG | eekd₁₀kke | 41 | 25559 | 25574 | 2030 |
| 548570 | n/a | n/a | ATGCCTTGTGCCTATT | eekd₁₀kke | 74 | 25706 | 25721 | 2031 |
| 548571 | n/a | n/a | ACTCTGAGGCCTTAGG | eekd₁₀kke | 59 | 25794 | 25809 | 2032 |
| 548572 | n/a | n/a | GCATTACTCAGCATGT | eekd₁₀kke | 63 | 25836 | 25851 | 2033 |
| 548573 | n/a | n/a | CCAGTCACCACCATTG | eekd₁₀kke | 65 | 25862 | 25877 | 2034 |
| 548574 | n/a | n/a | GGTCTAACTCTAAGGG | eekd₁₀kke | 0 | 25920 | 25935 | 2035 |
| 548575 | n/a | n/a | TGTCCTTTAAAGTATC | eekd₁₀kke | 18 | 25971 | 25986 | 2036 |
| 548576 | n/a | n/a | TCATGTGGCAACCTGT | eekd₁₀kke | 41 | 26114 | 26129 | 2037 |
| 548577 | n/a | n/a | AATCTGCACCTGGCAG | eekd₁₀kke | 42 | 26428 | 26443 | 2038 |
| 548578 | n/a | n/a | CATGGCTATTGCTTCC | eekd₁₀kke | 73 | 26513 | 26528 | 2039 |
| 548579 | n/a | n/a | GGGCTATATTGCCAGC | eekd₁₀kke | 46 | 26614 | 26629 | 2040 |
| 548580 | n/a | n/a | CCAGAGCCTTGATCAG | eekd₁₀kke | 36 | 26681 | 26696 | 2041 |
| 548581 | n/a | n/a | GGTGGGTTATCTGAGA | eekd₁₀kke | 13 | 26710 | 26725 | 2042 |
| 548582 | n/a | n/a | TAGCTCCATGCTGTGT | eekd₁₀kke | 59 | 26735 | 26750 | 2043 |
| 548583 | n/a | n/a | GGGAATTTATGCTGCC | eekd₁₀kke | 79 | 26782 | 26797 | 2044 |
| 548584 | n/a | n/a | TGATGAAGTTCCACCT | eekd₁₀kke | 47 | 26840 | 26855 | 2045 |
| 548585 | n/a | n/a | TAGGCACAGACAACCT | eekd₁₀kke | 33 | 26869 | 26884 | 2046 |
| 548586 | n/a | n/a | TCCAACTACAGGACTC | eekd₁₀kke | 39 | 26943 | 26958 | 2047 |
| 548587 | n/a | n/a | TTCTGGGAAACTCTCT | eekd₁₀kke | 45 | 26969 | 26984 | 2048 |
| 548588 | n/a | n/a | AGCTCACACCCAAAAA | eekd₁₀kke | 10 | 27006 | 27021 | 2049 |
| 548589 | n/a | n/a | TCTGTTACCTTGAGGA | eekd₁₀kke | 40 | 27280 | 27295 | 2050 |
| 548590 | n/a | n/a | TGGTCATGTCAACTGT | eekd₁₀kke | 35 | 27550 | 27565 | 2051 |
| 548591 | n/a | n/a | GTAAGCCTTCACAGGG | eekd₁₀kke | 3 | 27583 | 27598 | 2052 |
| 548592 | n/a | n/a | CTCACCAGAGTTGTCC | eekd₁₀kke | 7 | 27726 | 27741 | 2053 |
| 548593 | n/a | n/a | CATCCCTGACAGGTCC | eekd₁₀kke | 61 | 27759 | 27774 | 2054 |
| 548594 | n/a | n/a | CCCTTCTAACCAAGGA | eekd₁₀kke | 30 | 27825 | 27840 | 2055 |
| 548595 | n/a | n/a | GGATGAGATGCATCCA | eekd₁₀kke | 8 | 28069 | 28084 | 2056 |
| 548596 | n/a | n/a | ATGGCGGTGAAGCAGC | eekd₁₀kke | 20 | 28127 | 28142 | 2057 |
| 548597 | n/a | n/a | TGAATACCATCCCCGC | eekd₁₀kke | 50 | 28171 | 28186 | 2058 |
| 548598 | n/a | n/a | GCGCCATCTGCCCTGT | eekd₁₀kke | 50 | 28253 | 28268 | 2059 |
| 548599 | n/a | n/a | TGGGTTGGAGGAGTGG | eekd₁₀kke | 19 | 28311 | 28326 | 2060 |
| 548600 | n/a | n/a | TGGTGGTGGGATTGGT | eekd₁₀kke | 53 | 28336 | 28351 | 2061 |
| | | | | | | 28391 | 28406 | |
| | | | | | | 28434 | 28449 | |
| | | | | | | 28446 | 28461 | |
| | | | | | | 28525 | 28540 | |
| | | | | | | 28611 | 28626 | |
| | | | | | | 28623 | 28638 | |
| 548601 | n/a | n/a | TTGGTGGTGGGATTGG | eekd₁₀kke | 18 | 28337 | 28352 | 2062 |
| | | | | | | 28392 | 28407 | |
| | | | | | | 28435 | 28450 | |
| | | | | | | 28447 | 28462 | |
| | | | | | | 28526 | 28541 | |
| | | | | | | 28612 | 28627 | |
| | | | | | | 28624 | 28639 | |
| 548602 | n/a | n/a | GGTGGTGGAATTGGTG | eekd₁₀kke | 20 | 28347 | 28362 | 2063 |
| 548603 | n/a | n/a | GAGATTGGTGGTGGGT | eekd₁₀kke | 35 | 28372 | 28387 | 2064 |
| 548604 | n/a | n/a | GTGGTGGGATTGGTGC | eekd₁₀kke | 22 | 28432 | 28447 | 2065 |
| 548605 | n/a | n/a | TGGCGGGATTGGTGGT | eekd₁₀kke | 12 | 28479 | 28494 | 2066 |
| | | | | | | 28558 | 28573 | |
| 548606 | n/a | n/a | CGGTGGTGGGATTGGT | eekd₁₀kke | 41 | 28501 | 28516 | 2067 |
| | | | | | | 28580 | 28595 | |
| 548607 | n/a | n/a | TCGGTGGTGGGATTGG | eekd₁₀kke | 34 | 28502 | 28517 | 2068 |
| | | | | | | 28581 | 28596 | |
| 548608 | n/a | n/a | ATCGGTGGTGGGATTG | eekd₁₀kke | 25 | 28503 | 28518 | 2069 |
| | | | | | | 28582 | 28597 | |
| 548609 | n/a | n/a | GATCGGTGGTGGGATT | eekd₁₀kke | 30 | 28504 | 28519 | 2070 |
| | | | | | | 28583 | 28598 | |
| 548610 | n/a | n/a | GGATCGGTGGTGGGAT | eekd₁₀kke | 2 | 28505 | 28520 | 2071 |
| | | | | | | 28584 | 28599 | |
| 548611 | n/a | n/a | GCGGGATCGGTGGTGG | eekd₁₀kke | 7 | 28508 | 28523 | 2072 |
| | | | | | | 28587 | 28602 | |
| 548612 | n/a | n/a | GGCGGGATCGGTGGTG | eekd₁₀kke | 20 | 28509 | 28524 | 2073 |
| | | | | | | 28588 | 28603 | |

TABLE 151

| | SEQ | SEQ | | | | SEQ | SEQ | |
|---|---|---|---|---|---|---|---|---|
| | ID | ID | | | | ID | ID | |
| | NO: | NO: | | | | NO: | NO: | |
| | 1 | 1 | | | % | 10 | 10 | SEQ |
| | Start | Stop | | | inhi- | Start | Stop | ID |
| ISIS NO | Site | Site | Sequence | Chemistry | bition | Site | Site | NO |
| 531231 | n/a | n/a | TATCACTGTACTAGTT | eeeeed₁₀eeeee | 46 | 14744 | 14763 | 334 |
| | | | TCCT | | | 14815 | 14834 | |
| | | | | | | 14886 | 14905 | |
| | | | | | | 14945 | 14964 | |
| | | | | | | 15005 | 15024 | |
| | | | | | | 15077 | 15096 | |
| | | | | | | 15220 | 15239 | |
| | | | | | | 15292 | 15311 | |
| | | | | | | 15351 | 15370 | |
| | | | | | | 15411 | 15430 | |
| | | | | | | 15483 | 15502 | |
| | | | | | | 15555 | 15574 | |
| | | | | | | 15613 | 15632 | |
| | | | | | | 15685 | 15704 | |
| | | | | | | 15815 | 15834 | |
| | | | | | | 15887 | 15906 | |
| | | | | | | 15945 | 15964 | |
| 547747 | n/a | n/a | TCACTGTACTAGTTTC | eekd₁₀kke | 64 | 14746 | 14761 | 1267 |
| | | | | | | 14817 | 14832 | |
| | | | | | | 14888 | 14903 | |
| | | | | | | 14947 | 14962 | |
| | | | | | | 15007 | 15022 | |
| | | | | | | 15079 | 15094 | |
| | | | | | | 15222 | 15237 | |
| | | | | | | 15294 | 15309 | |
| | | | | | | 15353 | 15368 | |
| | | | | | | 15413 | 15428 | |
| | | | | | | 15485 | 15500 | |
| | | | | | | 15557 | 15572 | |
| | | | | | | 15615 | 15630 | |
| | | | | | | 15687 | 15702 | |
| | | | | | | 15817 | 15832 | |
| | | | | | | 15889 | 15904 | |
| | | | | | | 15947 | 15962 | |
| 548382 | n/a | n/a | GAGCAAATACAGTCCA | eekd₁₀kke | 19 | 12620 | 12635 | 2074 |
| 548383 | n/a | n/a | GTCTCGATGGCAAGCT | eekd₁₀kke | 49 | 12654 | 12669 | 2075 |
| 548384 | n/a | n/a | CTCACCGGTACTCTGC | eekd₁₀kke | 49 | 12805 | 12820 | 2076 |
| 548385 | n/a | n/a | TCCTGGAGGCACCAAT | eekd₁₀kke | 0 | 12847 | 12862 | 2077 |
| 548386 | n/a | n/a | AGCCCTGTTTGGTTTT | eekd₁₀kke | 0 | 12903 | 12918 | 2078 |
| 548387 | n/a | n/a | TGAAGGGCGAGGCGCA | eekd₁₀kke | 22 | 13261 | 13276 | 2079 |
| 548388 | n/a | n/a | AAGAGGATGTCAGGCT | eekd₁₀kke | 4 | 13357 | 13372 | 2080 |
| 548389 | n/a | n/a | TTGAGGAAAGACCTGC | eekd₁₀kke | 11 | 13399 | 13414 | 2081 |
| 548390 | n/a | n/a | GCTGAGTGTGACTTAA | eekd₁₀kke | 43 | 13455 | 13470 | 2082 |
| 548391 | n/a | n/a | GTACATGACTCCAGTG | eekd₁₀kke | 34 | 13638 | 13653 | 2083 |
| 548392 | n/a | n/a | GTAGAGCATGGAGCGA | eekd₁₀kke | 31 | 13730 | 13745 | 2084 |
| 548393 | n/a | n/a | CGCTTCAGGAAAGCGA | eekd₁₀kke | 26 | 13828 | 13843 | 2085 |
| 548394 | n/a | n/a | GGCAGGAGACTCCGTG | eekd₁₀kke | 25 | 13919 | 13934 | 2086 |
| 548395 | n/a | n/a | ATCCTTCCCCTCGCAA | eekd₁₀kke | 0 | 13966 | 13981 | 2087 |
| 548396 | n/a | n/a | TAATGAGTGGGTTAGG | eekd₁₀kke | 0 | 14007 | 14022 | 2088 |
| 548397 | n/a | n/a | GGAGCAGTGCAGGTAA | eekd₁₀kke | 1 | 14065 | 14080 | 2089 |
| 548398 | n/a | n/a | ATAGGCAATTGTTCCT | eekd₁₀kke | 55 | 14129 | 14144 | 2090 |
| 548399 | n/a | n/a | AGTCCTACAATTACCA | eekd₁₀kke | 11 | 14239 | 14254 | 2091 |
| 548400 | n/a | n/a | GGGCTCCTATTCCACC | eekd₁₀kke | 13 | 14277 | 14292 | 2092 |
| 548401 | n/a | n/a | GCCAGCTATGGGAACA | eekd₁₀kke | 71 | 14333 | 14348 | 2093 |
| 548402 | n/a | n/a | CCCCATCTCGAAGCCC | eekd₁₀kke | 45 | 14380 | 14395 | 2094 |
| 548403 | n/a | n/a | GAGTACATTGGGCCCA | eekd₁₀kke | 25 | 14418 | 14433 | 2095 |
| 548404 | n/a | n/a | GAGCCTTCCGCCTCTC | eekd₁₀kke | 37 | 14471 | 14486 | 2096 |
| 548405 | n/a | n/a | CGGACCTTCATCTTCA | eekd₁₀kke | 35 | 14529 | 14544 | 2097 |
| 548406 | n/a | n/a | TCTAGAGGCCGCCTGC | eekd₁₀kke | 0 | 14558 | 14573 | 2098 |
| 548407 | n/a | n/a | CCTATAACTGCTGCTC | eekd₁₀kke | 24 | 14731 | 14746 | 2099 |
| 548408 | n/a | n/a | TATCACTGTACTAGTT | eekd₁₀kke | 47 | 14748 | 14763 | 1269 |
| | | | | | | 14819 | 14834 | |
| | | | | | | 14890 | 14905 | |
| | | | | | | 14949 | 14964 | |
| | | | | | | 15009 | 15024 | |
| | | | | | | 15081 | 15096 | |
| | | | | | | 15153 | 15168 | |
| | | | | | | 15224 | 15239 | |
| | | | | | | 15296 | 15311 | |
| | | | | | | 15355 | 15370 | |
| | | | | | | 15415 | 15430 | |
| | | | | | | 15487 | 15502 | |
| | | | | | | 15559 | 15574 | |
| | | | | | | 15617 | 15632 | |
| | | | | | | 15689 | 15704 | |
| | | | | | | 15819 | 15834 | |
| | | | | | | 15891 | 15906 | |
| | | | | | | 15949 | 15964 | |
| 548409 | n/a | n/a | GTATCACTGTACTAGT | eekd₁₀kke | 81 | 14749 | 14764 | 2100 |
| | | | | | | 14820 | 14835 | |
| | | | | | | 14891 | 14906 | |
| | | | | | | 14950 | 14965 | |
| | | | | | | 15010 | 15025 | |
| | | | | | | 15082 | 15097 | |
| | | | | | | 15154 | 15169 | |
| | | | | | | 15225 | 15240 | |
| | | | | | | 15297 | 15312 | |
| | | | | | | 15356 | 15371 | |
| | | | | | | 15416 | 15431 | |
| | | | | | | 15488 | 15503 | |
| | | | | | | 15560 | 15575 | |
| | | | | | | 15618 | 15633 | |
| | | | | | | 15690 | 15705 | |
| | | | | | | 15820 | 15835 | |
| | | | | | | 15892 | 15907 | |
| | | | | | | 15950 | 15965 | |
| 548410 | n/a | n/a | AGTATCACTGTACTAG | eekd₁₀kke | 85 | 14750 | 14765 | 2101 |
| | | | | | | 14821 | 14836 | |
| | | | | | | 14892 | 14907 | |
| | | | | | | 14951 | 14966 | |
| | | | | | | 15011 | 15026 | |
| | | | | | | 15083 | 15098 | |
| | | | | | | 15155 | 15170 | |
| | | | | | | 15226 | 15241 | |
| | | | | | | 15298 | 15313 | |
| | | | | | | 15357 | 15372 | |
| | | | | | | 15417 | 15432 | |
| | | | | | | 15489 | 15504 | |
| | | | | | | 15561 | 15576 | |
| | | | | | | 15619 | 15634 | |
| | | | | | | 15691 | 15706 | |
| | | | | | | 15821 | 15836 | |
| | | | | | | 15893 | 15908 | |
| | | | | | | 15951 | 15966 | |
| 548411 | n/a | n/a | CAGTATCACTGTACTA | eekd₁₀kke | 72 | 14751 | 14766 | 2102 |
| | | | | | | 14822 | 14837 | |
| | | | | | | 14893 | 14908 | |
| | | | | | | 14952 | 14967 | |
| | | | | | | 15012 | 15027 | |
| | | | | | | 15084 | 15099 | |
| | | | | | | 15156 | 15171 | |
| | | | | | | 15227 | 15242 | |
| | | | | | | 15299 | 15314 | |
| | | | | | | 15358 | 15373 | |
| | | | | | | 15418 | 15433 | |
| | | | | | | 15490 | 15505 | |
| | | | | | | 15562 | 15577 | |
| | | | | | | 15620 | 15635 | |
| | | | | | | 15692 | 15707 | |
| | | | | | | 15822 | 15837 | |
| | | | | | | 15894 | 15909 | |
| | | | | | | 15952 | 15967 | |
| 548412 | n/a | n/a | TAACAGTATCACTGTA | eekd₁₀kke | 17 | 14754 | 14769 | 2103 |
| | | | | | | 14825 | 14840 | |
| | | | | | | 14896 | 14911 | |
| | | | | | | 14955 | 14970 | |
| | | | | | | 15015 | 15030 | |
| | | | | | | 15087 | 15102 | |
| | | | | | | 15159 | 15174 | |
| | | | | | | 15230 | 15245 | |
| | | | | | | 15302 | 15317 | |
| | | | | | | 15361 | 15376 | |
| | | | | | | 15421 | 15436 | |
| | | | | | | 15493 | 15508 | |
| | | | | | | 15565 | 15580 | |
| | | | | | | 15623 | 15638 | |
| | | | | | | 15695 | 15710 | |
| | | | | | | 15825 | 15840 | |
| | | | | | | 15897 | 15912 | |
| | | | | | | 15955 | 15970 | |
| 548413 | n/a | n/a | CTAACAGTATCACTGT | eekd₁₀kke | 55 | 14755 | 14770 | 2104 |
| | | | | | | 14826 | 14841 | |
| | | | | | | 14897 | 14912 | |
| | | | | | | 15016 | 15031 | |
| | | | | | | 15088 | 15103 | |
| | | | | | | 15231 | 15246 | |
| | | | | | | 15303 | 15318 | |
| | | | | | | 15422 | 15437 | |
| | | | | | | 15494 | 15509 | |
| | | | | | | 15624 | 15639 | |
| | | | | | | 15826 | 15841 | |
| | | | | | | 15956 | 15971 | |
| 548414 | n/a | n/a | TCTAACAGTATCACTG | eekd₁₀kke | 20 | 14756 | 14771 | 2105 |
| | | | | | | 14827 | 14842 | |
| | | | | | | 14898 | 14913 | |
| | | | | | | 15017 | 15032 | |
| | | | | | | 15089 | 15104 | |
| | | | | | | 15232 | 15247 | |
| | | | | | | 15304 | 15319 | |
| | | | | | | 15423 | 15438 | |
| | | | | | | 15495 | 15510 | |
| | | | | | | 15625 | 15640 | |
| | | | | | | 15827 | 15842 | |
| | | | | | | 15957 | 15972 | |
| 548415 | n/a | n/a | ATAACTCTAACAGTAT | eekd₁₀kke | 0 | 14761 | 14776 | 2106 |
| | | | | | | 14832 | 14847 | |
| | | | | | | 14903 | 14918 | |
| | | | | | | 15022 | 15037 | |
| | | | | | | 15094 | 15109 | |
| | | | | | | 15237 | 15252 | |
| | | | | | | 15309 | 15324 | |
| | | | | | | 15428 | 15443 | |
| | | | | | | 15500 | 15515 | |
| | | | | | | 15630 | 15645 | |
| | | | | | | 15832 | 15847 | |
| | | | | | | 15962 | 15977 | |
| 548416 | n/a | n/a | CTATAACTCTAACAGT | eekd₁₀kke | 9 | 14763 | 14778 | 2107 |
| | | | | | | 14834 | 14849 | |
| | | | | | | 14905 | 14920 | |
| | | | | | | 15024 | 15039 | |
| | | | | | | 15096 | 15111 | |
| | | | | | | 15239 | 15254 | |
| | | | | | | 15311 | 15326 | |
| | | | | | | 15430 | 15445 | |
| | | | | | | 15502 | 15517 | |
| | | | | | | 15632 | 15647 | |
| | | | | | | 15834 | 15849 | |
| | | | | | | 15964 | 15979 | |
| 548417 | n/a | n/a | ACTGTCCTATAACTCT | eekd₁₀kke | 24 | 14769 | 14784 | 2108 |
| | | | | | | 14840 | 14855 | |
| 548418 | n/a | n/a | TATATCACTGTCCTAT | eekd₁₀kke | 39 | 14775 | 14790 | 2109 |
| | | | | | | 14846 | 14861 | |
| | | | | | | 15180 | 15195 | |
| | | | | | | 15716 | 15731 | |
| | | | | | | 16164 | 16179 | |
| 548419 | n/a | n/a | CCTATATCACTGTCCT | eekd₁₀kke | 52 | 14777 | 14792 | 2110 |
| | | | | | | 14848 | 14863 | |
| | | | | | | 15182 | 15197 | |
| | | | | | | 15718 | 15733 | |
| 548420 | n/a | n/a | TCCTATATCACTGTCC | eekd₁₀kke | 58 | 14778 | 14793 | 2111 |
| | | | | | | 14849 | 14864 | |
| | | | | | | 15183 | 15198 | |
| | | | | | | 15719 | 15734 | |
| 548421 | n/a | n/a | CACTGTCCTATATCAC | eekd₁₀kke | 56 | 14783 | 14798 | 2112 |
| | | | | | | 14854 | 14869 | |
| | | | | | | 14979 | 14994 | |
| | | | | | | 15117 | 15132 | |
| | | | | | | 15188 | 15203 | |
| | | | | | | 15260 | 15275 | |
| | | | | | | 15385 | 15400 | |
| | | | | | | 15523 | 15538 | |
| | | | | | | 15653 | 15668 | |
| | | | | | | 15724 | 15739 | |
| | | | | | | 15855 | 15870 | |
| | | | | | | 15985 | 16000 | |
| 548422 | n/a | n/a | GTATCACTGTCCTATA | eekd₁₀kke | 69 | 14787 | 14802 | 2113 |
| | | | | | | 14983 | 14998 | |
| | | | | | | 15121 | 15136 | |
| | | | | | | 15389 | 15404 | |
| | | | | | | 15527 | 15542 | |
| | | | | | | 15989 | 16004 | |
| 548423 | n/a | n/a | AGTATCACTGTCCTAT | eekd₁₀kke | 72 | 14788 | 14803 | 2114 |
| | | | | | | 14984 | 14999 | |
| | | | | | | 15050 | 15065 | |
| | | | | | | 15122 | 15137 | |
| | | | | | | 15390 | 15405 | |
| | | | | | | 15456 | 15471 | |
| | | | | | | 15528 | 15543 | |
| | | | | | | 15990 | 16005 | |
| 548424 | n/a | n/a | CAGTATCACTGTCCTA | eekd₁₀kke | 90 | 14789 | 14804 | 2115 |
| | | | | | | 14985 | 15000 | |
| | | | | | | 15051 | 15066 | |
| | | | | | | 15123 | 15138 | |
| | | | | | | 15391 | 15406 | |
| | | | | | | 15457 | 15472 | |
| | | | | | | 15529 | 15544 | |
| | | | | | | 15991 | 16006 | |
| 548425 | n/a | n/a | AACAGTATCACTGTCC | eekd₁₀kke | 90 | 14791 | 14806 | 2116 |
| | | | | | | 14987 | 15002 | |
| | | | | | | 15053 | 15068 | |
| | | | | | | 15125 | 15140 | |
| | | | | | | 15393 | 15408 | |
| | | | | | | 15459 | 15474 | |
| | | | | | | 15531 | 15546 | |
| | | | | | | 15993 | 16008 | |
| 548426 | n/a | n/a | TATAACAGTATCACTG | eekd₁₀kke | 14 | 14794 | 14809 | 2117 |
| | | | | | | 14990 | 15005 | |
| | | | | | | 15056 | 15071 | |
| | | | | | | 15128 | 15143 | |
| | | | | | | 15161 | 15176 | |
| | | | | | | 15363 | 15378 | |
| | | | | | | 15396 | 15411 | |
| | | | | | | 15462 | 15477 | |
| | | | | | | 15534 | 15549 | |
| | | | | | | 15567 | 15582 | |
| | | | | | | 15697 | 15712 | |
| | | | | | | 15899 | 15914 | |
| | | | | | | 15996 | 16011 | |
| 548427 | n/a | n/a | CTATAACAGTATCACT | eekd₁₀kke | 24 | 14795 | 14810 | 2118 |
| | | | | | | 14991 | 15006 | |
| | | | | | | 15057 | 15072 | |
| | | | | | | 15129 | 15144 | |
| | | | | | | 15162 | 15177 | |
| | | | | | | 15364 | 15379 | |
| | | | | | | 15397 | 15412 | |
| | | | | | | 15463 | 15478 | |
| | | | | | | 15535 | 15550 | |
| | | | | | | 15568 | 15583 | |
| | | | | | | 15698 | 15713 | |
| | | | | | | 15900 | 15915 | |
| | | | | | | 15997 | 16012 | |
| 548428 | n/a | n/a | TAACTATAACAGTATC | eekd₁₀kke | 0 | 14798 | 14813 | 2119 |
| | | | | | | 15060 | 15075 | |
| | | | | | | 15132 | 15147 | |
| | | | | | | 15165 | 15180 | |
| | | | | | | 15466 | 15481 | |
| | | | | | | 15538 | 15553 | |
| | | | | | | 15571 | 15586 | |
| | | | | | | 15701 | 15716 | |
| | | | | | | 15772 | 15787 | |
| | | | | | | 16000 | 16015 | |
| 548429 | n/a | n/a | TATAACTATAACAGTA | eekd₁₀kke | 0 | 14800 | 14815 | 2120 |
| | | | | | | 15062 | 15077 | |
| | | | | | | 15134 | 15149 | |
| | | | | | | 15167 | 15182 | |
| | | | | | | 15468 | 15483 | |
| | | | | | | 15540 | 15555 | |
| | | | | | | 15573 | 15588 | |
| | | | | | | 15703 | 15718 | |
| | | | | | | 15774 | 15789 | |
| | | | | | | 16002 | 16017 | |
| 548430 | n/a | n/a | CCTATAACTATAACAG | eekd₁₀kke | 21 | 14802 | 14817 | 2121 |
| | | | | | | 15064 | 15079 | |
| | | | | | | 15169 | 15184 | |
| | | | | | | 15470 | 15485 | |
| | | | | | | 15542 | 15557 | |
| | | | | | | 15575 | 15590 | |
| | | | | | | 15705 | 15720 | |
| | | | | | | 15776 | 15791 | |
| | | | | | | 16004 | 16019 | |
| 548431 | n/a | n/a | TACCTATAACTCTAAC | eekd₁₀kke | 9 | 14908 | 14923 | 2122 |
| | | | | | | 15027 | 15042 | |
| | | | | | | 15099 | 15114 | |
| | | | | | | 15242 | 15257 | |
| | | | | | | 15314 | 15329 | |
| | | | | | | 15433 | 15448 | |
| | | | | | | 15505 | 15520 | |
| | | | | | | 15635 | 15650 | |
| | | | | | | 15837 | 15852 | |
| | | | | | | 15967 | 15982 | |
| 548432 | n/a | n/a | ACTGTACCTATAACTC | eekd₁₀kke | 43 | 14912 | 14927 | 2123 |
| | | | | | | 15031 | 15046 | |
| | | | | | | 15246 | 15261 | |
| | | | | | | 15318 | 15333 | |
| | | | | | | 15437 | 15452 | |
| | | | | | | 15509 | 15524 | |
| | | | | | | 15639 | 15654 | |
| | | | | | | 15841 | 15856 | |
| | | | | | | 15971 | 15986 | |
| 548433 | n/a | n/a | TATCACTGTACCTATA | eekd₁₀kke | 33 | 14916 | 14931 | 2124 |
| | | | | | | 15250 | 15265 | |
| | | | | | | 15322 | 15337 | |
| | | | | | | 15375 | 15390 | |
| | | | | | | 15513 | 15528 | |
| | | | | | | 15643 | 15658 | |
| | | | | | | 15786 | 15801 | |
| | | | | | | 15845 | 15860 | |
| | | | | | | 15975 | 15990 | |
| | | | | | | 16137 | 16152 | |
| 548434 | n/a | n/a | ACAATATCACTGTACC | eekd₁₀kke | 63 | 14920 | 14935 | 2125 |
| | | | | | | 15326 | 15341 | |
| | | | | | | 15790 | 15805 | |
| | | | | | | 16063 | 16078 | |
| | | | | | | 16141 | 16156 | |
| 548435 | n/a | n/a | AACAATATCACTGTAC | eekd₁₀kke | 19 | 14921 | 14936 | 2126 |
| | | | | | | 15327 | 15342 | |
| | | | | | | 15791 | 15806 | |
| | | | | | | 16064 | 16079 | |
| | | | | | | 16142 | 16157 | |
| 548436 | n/a | n/a | ATATCACTGTACCTGT | eekd₁₀kke | 8 | 14970 | 14985 | 2127 |
| 548437 | n/a | n/a | TATATCACTGTACCTG | eekd₁₀kke | 74 | 14971 | 14986 | 2128 |
| 548438 | n/a | n/a | CTATATCACTGTACCT | eekd₁₀kke | 38 | 14972 | 14987 | 2129 |
| | | | | | | 15253 | 15268 | |
| | | | | | | 15378 | 15393 | |
| | | | | | | 15516 | 15531 | |
| | | | | | | 15646 | 15661 | |
| | | | | | | 15848 | 15863 | |
| | | | | | | 15978 | 15993 | |
| 548439 | n/a | n/a | CCTATATCACTGTACC | eekd₁₀kke | 46 | 14973 | 14988 | 2130 |
| | | | | | | 15254 | 15269 | |
| | | | | | | 15379 | 15394 | |
| | | | | | | 15517 | 15532 | |
| | | | | | | 15647 | 15662 | |
| | | | | | | 15849 | 15864 | |
| | | | | | | 15979 | 15994 | |
| 548440 | n/a | n/a | CCTATAACAGTATCAC | eekd₁₀kke | 32 | 14992 | 15007 | 2131 |
| | | | | | | 15365 | 15380 | |
| | | | | | | 15398 | 15413 | |
| 548441 | n/a | n/a | TCCTATAACAGTATCA | eekd₁₀kke | 42 | 14993 | 15008 | 2132 |
| | | | | | | 15399 | 15414 | |
| 548442 | n/a | n/a | TTCCTATAACAGTATC | eekd₁₀kke | 17 | 14994 | 15009 | 2133 |
| | | | | | | 15400 | 15415 | |
| 548443 | n/a | n/a | GTTTCCTATAACAGTA | eekd₁₀kke | 12 | 14996 | 15011 | 2134 |
| | | | | | | 15402 | 15417 | |
| 548444 | n/a | n/a | CTATGTCACTGTACCT | eekd₁₀kke | 43 | 15038 | 15053 | 2135 |
| | | | | | | 15444 | 15459 | |
| 548445 | n/a | n/a | CCTATGTCACTGTACC | eekd₁₀kke | 62 | 15039 | 15054 | 2136 |
| | | | | | | 15445 | 15460 | |
| 548446 | n/a | n/a | TCCTATGTCACTGTAC | eekd₁₀kke | 16 | 15040 | 15055 | 2137 |
| | | | | | | 15446 | 15461 | |
| 548447 | n/a | n/a | CACTGTCCTATGTCAC | eekd₁₀kke | 59 | 15045 | 15060 | 2138 |
| | | | | | | 15451 | 15466 | |
| 548448 | n/a | n/a | TCACTGTCCTATGTCA | eekd₁₀kke | 61 | 15046 | 15061 | 2139 |
| | | | | | | 15452 | 15467 | |
| 548449 | n/a | n/a | ATCACTGTCCTATGTC | eekd₁₀kke | 62 | 15047 | 15062 | 2140 |
| | | | | | | 15453 | 15468 | |
| 548450 | n/a | n/a | CTACCTATAACTCTAA | eekd₁₀kke | 0 | 15100 | 15115 | 2141 |
| | | | | | | 15171 | 15186 | |
| | | | | | | 15577 | 15592 | |
| 548451 | n/a | n/a | GTCCTATAACTATAAC | eekd₁₀kke | 0 | 15707 | 15722 | 2142 |
| 548452 | n/a | n/a | TATATCACTGTACCTA | eekd₁₀kke | 65 | 16006 | 16021 | 2143 |
| | | | | | | 16077 | 16092 | |
| | | | | | | 16102 | 16117 | |
| | | | | | | 16155 | 16170 | |
| | | | | | | 15252 | 15267 | |
| | | | | | | 15377 | 15392 | |
| | | | | | | 15515 | 15530 | |
| | | | | | | 15645 | 15660 | |
| | | | | | | 15847 | 15862 | |
| | | | | | | 15977 | 15992 | |
| 548453 | n/a | n/a | TACCTATAACAGTATC | eekd₁₀kke | 12 | 15367 | 15382 | 2144 |
| 548454 | n/a | n/a | ACTGTACCTATAACAG | eekd₁₀kke | 17 | 15371 | 15386 | 2145 |
| 548455 | n/a | n/a | CACCGTACTAGTTTCC | eekd₁₀kke | 64 | 15757 | 15772 | 2146 |
| 548456 | n/a | n/a | TATAACAGTATCACCG | eekd₁₀kke | 52 | 15768 | 15783 | 2147 |
| 548457 | n/a | n/a | CTATAACAGTATCACC | eekd₁₀kke | 13 | 15769 | 15784 | 2148 |
| 548458 | n/a | n/a | ACCTATAACTATAACA | eekd₁₀kke | 0 | 15777 | 15792 | 2149 |
| | | | | | | 16249 | 16264 | |

TABLE 152

| | SEQ | SEQ | | | | SEQ | SEQ | |
|---|---|---|---|---|---|---|---|---|
| | ID | ID | | | | ID | ID | |
| | NO: | NO: | | | | NO: | NO: | |
| | 1 | 1 | | | % | 10 | 10 | SEQ |
| | Start | Stop | | | inhi- | Start | Stop | ID |
| ISIS NO | Site | Site | Sequence | Chemistry | bition | Site | Site | NO |
| 531231 | n/a | n/a | TATCACTGTACTAGTT | eeeeed₁₀eeeee | 48 | 14744 | 14763 | 334 |
| | | | TCCT | | | 14815 | 14834 | |
| | | | | | | 14886 | 14905 | |
| | | | | | | 14945 | 14964 | |
| | | | | | | 15005 | 15024 | |
| | | | | | | 15077 | 15096 | |
| | | | | | | 15220 | 15239 | |
| | | | | | | 15292 | 15311 | |
| | | | | | | 15351 | 15370 | |
| | | | | | | 15411 | 15430 | |
| | | | | | | 15483 | 15502 | |
| | | | | | | 15555 | 15574 | |
| | | | | | | 15613 | 15632 | |
| | | | | | | 15685 | 15704 | |
| | | | | | | 15815 | 15834 | |
| | | | | | | 15887 | 15906 | |
| | | | | | | 15945 | 15964 | |
| 547747 | n/a | n/a | TCACTGTACTAGTTTC | eekd₁₀kke | 88 | 14746 | 14761 | 1267 |
| | | | | | | 14817 | 14832 | |
| | | | | | | 14888 | 14903 | |
| | | | | | | 14947 | 14962 | |
| | | | | | | 15007 | 15022 | |
| | | | | | | 15079 | 15094 | |
| | | | | | | 15222 | 15237 | |
| | | | | | | 15294 | 15309 | |
| | | | | | | 15353 | 15368 | |
| | | | | | | 15413 | 15428 | |
| | | | | | | 15485 | 15500 | |
| | | | | | | 15557 | 15572 | |
| | | | | | | 15615 | 15630 | |
| | | | | | | 15687 | 15702 | |
| | | | | | | 15817 | 15832 | |
| | | | | | | 15889 | 15904 | |
| | | | | | | 15947 | 15962 | |
| 548613 | n/a | n/a | TGGCGGGATCGGTGGT | eekd₁₀kke | 39 | 28510 | 28525 | 2150 |
| | | | | | | 28589 | 28604 | |
| 548614 | n/a | n/a | TGGTGGCGGGATCGGT | eekd₁₀kke | 0 | 28513 | 28528 | 2151 |
| | | | | | | 28592 | 28607 | |
| 548615 | n/a | n/a | TTGGTGGCGGGATCGG | eekd₁₀kke | 10 | 28514 | 28529 | 2152 |
| | | | | | | 28593 | 28608 | |
| 548616 | n/a | n/a | ATTGGTGGCGGGATCG | eekd₁₀kke | 35 | 28515 | 28530 | 2153 |
| 548617 | n/a | n/a | GATTGGTGGCGGGATC | eekd₁₀kke | 44 | 28516 | 28531 | 2154 |
| 548618 | n/a | n/a | GTTGGTGGCGGGATCG | eekd₁₀kke | 18 | 28594 | 28609 | 2155 |
| 548619 | n/a | n/a | GGTTGGTGGCGGGATC | eekd₁₀kke | 19 | 28595 | 28610 | 2156 |
| 548620 | n/a | n/a | TGGTTGGTGGCGGGAT | eekd₁₀kke | 24 | 28596 | 28611 | 2157 |
| 548621 | n/a | n/a | GAACACATCAGGGATT | eekd₁₀kke | 33 | 28638 | 28653 | 2158 |
| 548622 | n/a | n/a | TTTCTATGGGCCTGAC | eekd₁₀kke | 0 | 28669 | 28684 | 2159 |
| 548623 | n/a | n/a | GCTGTCACTTAAGCCA | eekd₁₀kke | 16 | 28862 | 28877 | 2160 |
| 548624 | n/a | n/a | TCTAGGGCCACACCTC | eekd₁₀kke | 24 | 28892 | 28907 | 2161 |
| 548625 | n/a | n/a | GTTCTACACACAGTAC | eekd₁₀kke | 0 | 29014 | 29029 | 2162 |
| 548626 | n/a | n/a | GCAGTATGTTCAATCC | eekd₁₀kke | 36 | 29202 | 29217 | 2163 |
| 548627 | n/a | n/a | CCCACATGTACCACCG | eekd₁₀kke | 22 | 29235 | 29250 | 2164 |
| 548628 | n/a | n/a | GTATGGCAGAGCCCCT | eekd₁₀kke | 9 | 29285 | 29300 | 2165 |
| 548629 | n/a | n/a | CCCATCTTGGGACTTT | eekd₁₀kke | 44 | 29341 | 29356 | 2166 |
| 548630 | n/a | n/a | TGGTCCCAAATTGGAG | eekd₁₀kke | 33 | 29387 | 29402 | 2167 |
| 548631 | n/a | n/a | CTCACAATACTGAGCC | eekd₁₀kke | 55 | 29421 | 29436 | 2168 |
| 548632 | n/a | n/a | GGAGATATCAGGTGCA | eekd₁₀kke | 45 | 29499 | 29514 | 2169 |
| 548633 | n/a | n/a | CAAGGCATGTGTGCAC | eekd₁₀kke | 41 | 29534 | 29549 | 2170 |
| 548634 | n/a | n/a | GCCTTATTCTGTGCAA | eekd₁₀kke | 0 | 29583 | 29598 | 2171 |
| 548635 | n/a | n/a | AGGTGTGGCGCGCGCC | eekd₁₀kke | 18 | 29853 | 29868 | 2172 |
| 548636 | n/a | n/a | CTCTATACAGCTGGGC | eekd₁₀kke | 5 | 30000 | 30015 | 2173 |
| 548637 | n/a | n/a | GCTGATCTTCTAATGC | eekd₁₀kke | 38 | 30063 | 30078 | 2174 |
| 548638 | n/a | n/a | CCTCATTGCTCCACTA | eekd₁₀kke | 26 | 30103 | 30118 | 2175 |
| 548639 | n/a | n/a | TGGGAAGAAACTAGCA | eekd₁₀kke | 10 | 30159 | 30174 | 2176 |
| 548640 | n/a | n/a | GAATGTTGCTGTCCCA | eekd₁₀kke | 32 | 30194 | 30209 | 2177 |
| 548641 | n/a | n/a | GCATCATGCTTACTGC | eekd₁₀kke | 23 | 30225 | 30240 | 2178 |
| 548642 | n/a | n/a | GCGGCAGTAGTGAATC | eekd₁₀kke | 23 | 30288 | 30303 | 2179 |
| 548643 | n/a | n/a | CCTACCTAATTCCTCC | eekd₁₀kke | 0 | 30329 | 30344 | 2180 |
| 548644 | n/a | n/a | AACTGGGCAGTCCTTC | eekd₁₀kke | 14 | 30418 | 30433 | 2181 |
| 548645 | n/a | n/a | CCAGCGCAATTCTGCT | eekd₁₀kke | 8 | 30666 | 30681 | 2182 |
| 548646 | n/a | n/a | CGTTTCCCTCAACTCC | eekd₁₀kke | 24 | 30750 | 30765 | 2183 |
| 548647 | n/a | n/a | CACGGCAAGTCGCGGG | eekd₁₀kke | 39 | 30790 | 30805 | 2184 |
| 548648 | n/a | n/a | CAGTTGTATCCCTCCC | eekd₁₀kke | 32 | 30852 | 30867 | 2185 |
| 548649 | n/a | n/a | GCCTCTCAGACGGCAC | eekd₁₀kke | 0 | 30906 | 30921 | 2186 |
| 548650 | n/a | n/a | CTGATCCCACTTGCCC | eekd₁₀kke | 21 | 30991 | 31006 | 2187 |
| 548651 | n/a | n/a | AGTCTCTTTCCTACCC | eekd₁₀kke | 61 | 31030 | 31045 | 2188 |
| 548652 | n/a | n/a | CCACGATGCTCTGGCC | eekd₁₀kke | 65 | 31068 | 31083 | 2189 |
| 548653 | n/a | n/a | TCGGCTCCTGGCAGCA | eekd₁₀kke | 46 | 31111 | 31126 | 2190 |
| 548654 | n/a | n/a | ACCATTCCTGACCATG | eekd₁₀kke | 34 | 31151 | 31166 | 2191 |
| 548655 | n/a | n/a | CCCGAGGTCACATAAT | eekd₁₀kke | 56 | 31416 | 31431 | 2192 |
| 548656 | n/a | n/a | TTACAACAGACCCAGG | eekd₁₀kke | 35 | 31497 | 31512 | 2193 |
| 548657 | n/a | n/a | AGCAGGGTATCTTCAC | eekd₁₀kke | 26 | 31548 | 31563 | 2194 |
| 548658 | n/a | n/a | GAAGTTCCTGTGTCTT | eekd₁₀kke | 11 | 31593 | 31608 | 2195 |
| 548659 | n/a | n/a | CCAACCTCTAAGGCTA | eekd₁₀kke | 17 | 31721 | 31736 | 2196 |
| 548660 | n/a | n/a | ATGCTTACCTTTCTCC | eekd₁₀kke | 0 | 31955 | 31970 | 2197 |
| 548661 | n/a | n/a | ACGACCCACTCCATGT | eekd₁₀kke | 18 | 32016 | 32031 | 2198 |
| 548662 | n/a | n/a | TGCTTAAAAGTCTCCC | eekd₁₀kke | 5 | 32155 | 32170 | 2199 |
| 548663 | n/a | n/a | GCCCTAGAAGGGCCCA | eekd₁₀kke | 20 | 32219 | 32234 | 2200 |
| 548664 | n/a | n/a | GCGGGTGGTCTTGCAC | eekd₁₀kke | 38 | 32245 | 32260 | 2201 |
| 548665 | n/a | n/a | GCTCCCGGCCATTAGC | eekd₁₀kke | 8 | 32312 | 32327 | 2202 |
| 548666 | n/a | n/a | TCTCCATAGTGAGACG | eekd₁₀kke | 1 | 32342 | 32357 | 2203 |
| 548667 | n/a | n/a | TGGCAAGCTACCTTCT | eekd₁₀kke | 51 | 32384 | 32399 | 2204 |
| 548668 | n/a | n/a | GGGAGCTTTCATGGCT | eekd₁₀kke | 68 | 32506 | 32521 | 2205 |
| 548669 | n/a | n/a | AATGCAGGCCAGCATC | eekd₁₀kke | 42 | 32541 | 32556 | 2206 |
| 548670 | n/a | n/a | GAAAAGCCCTCCGAGC | eekd₁₀kke | 15 | 32590 | 32605 | 2207 |
| 548671 | n/a | n/a | CAACAATCCAAAGCCT | eekd₁₀kke | 3 | 32674 | 32689 | 2208 |
| 548672 | n/a | n/a | CCCCCCAGAAATCCCA | eekd₁₀kke | 40 | 32708 | 32723 | 2209 |
| 548673 | n/a | n/a | GACCTTGCTTCCATGT | eekd₁₀kke | 40 | 32753 | 32768 | 2210 |
| 548674 | n/a | n/a | GAGAGACGGCACCCTG | eekd₁₀kke | 4 | 32829 | 32844 | 2211 |
| 548675 | n/a | n/a | GGGAAGGTAGTGTTAC | eekd₁₀kke | 8 | 32898 | 32913 | 2212 |
| 548676 | n/a | n/a | GTGAATCAGAGCAGTG | eekd₁₀kke | 63 | 32963 | 32978 | 2213 |
| 548677 | n/a | n/a | TCACCTGTGAGTAACC | eekd₁₀kke | 40 | 33089 | 33104 | 2214 |
| 548678 | n/a | n/a | GAGTTACCTTACAAGC | eekd₁₀kke | 22 | 33232 | 33247 | 2215 |
| 548679 | n/a | n/a | TCTCAAGCAGCCTATT | eekd₁₀kke | 0 | 33267 | 33282 | 2216 |
| 548680 | n/a | n/a | GCCCCTCTTAAATAGC | eekd₁₀kke | 9 | 33446 | 33461 | 2217 |
| 548681 | n/a | n/a | GATATCATCATCCCAA | eekd₁₀kke | 22 | 33513 | 33528 | 2218 |
| 548682 | n/a | n/a | GTATCCCCTTTTCTAT | eekd₁₀kke | 0 | 33556 | 33571 | 2219 |
| 548683 | n/a | n/a | AGTATCTCATGTGCCT | eekd₁₀kke | 46 | 33581 | 33596 | 2220 |
| 548684 | n/a | n/a | CAAGACCTTGCTTGCC | eekd₁₀kke | 24 | 33658 | 33673 | 2221 |
| 548685 | n/a | n/a | TAGTCCACTACACAGC | eekd₁₀kke | 24 | 33802 | 33817 | 2222 |
| 548686 | n/a | n/a | ACGACAATGGGATTCA | eekd₁₀kke | 0 | 33844 | 33859 | 2223 |
| 548687 | n/a | n/a | GAATCTCCCTGAGTCA | eekd₁₀kke | 20 | 33888 | 33903 | 2224 |
| 548688 | n/a | n/a | TAGAGGGATCCCAGGA | eekd₁₀kke | 0 | 34416 | 34431 | 2225 |
| 548689 | n/a | n/a | CCAGGTGCAGCACGGA | eekd₁₀kke | 12 | 34483 | 34498 | 2226 |

### Example 117: Dose-Dependent Antisense Inhibition of Human PKK in HepaRG™ Cells

[1081] Gapmers from the studies described above exhibiting significant in vitro inhibition of PKK mRNA were selected and tested at various doses in HepaRG™ cells. Cells were plated at a density of 20,000 cells per well and transfected using electroporation with 0.12 μM, 0.37 μM, 1.11 μM, 3.33 μM, and 10.00 μM concentrations of antisense oligonucleotide. After a treatment period of approximately 16 hours, RNA was isolated from the cells and PKK mRNA levels were measured by quantitative real-time PCR. Human PKK primer probe set RTS3454 was used to measure mRNA levels. PKK mRNA levels were adjusted according to total RNA content, as measured by RIBOGREEN®. The antisense oligonucleotides were tested in a series of experiments that had similar culture conditions. The results for each experiment are presented in separate tables shown below. Results are presented as percent inhibition of PKK, relative to untreated control cells.

[1082] The half maximal inhibitory concentration (IC₅₀) of each oligonucleotide is also presented. PKK mRNA levels were significantly reduced in a dose-dependent manner in antisense oligonucleotide treated cells.

TABLE 153

| ISIS | 0.12 | 0.37 | 1.11 | 3.33 | 10.00 | IC₅₀ |
|---|---|---|---|---|---|---|
| No | μM | μM | μM | μM | μM | (μM) |
| 486847 | 0 | 34 | 48 | 71 | 87 | 1.1 |
| 530933 | 15 | 13 | 42 | 67 | 66 | 1.7 |
| 530959 | 12 | 27 | 53 | 80 | 94 | 0.9 |
| 530965 | 8 | 5 | 63 | 83 | 91 | 0.8 |
| 530967 | 30 | 36 | 48 | 82 | 91 | 0.7 |
| 530970 | 1 | 0 | 66 | 76 | 84 | 1.0 |
| 530971 | 12 | 40 | 52 | 66 | 70 | 1.3 |
| 530988 | 0 | 25 | 54 | 86 | 78 | 0.9 |
| 530992 | 0 | 50 | 63 | 83 | 80 | 0.7 |
| 531002 | 6 | 28 | 58 | 82 | 86 | 0.9 |
| 531004 | 0 | 14 | 25 | 71 | 84 | 2.1 |
| 531005 | 14 | 28 | 61 | 73 | 77 | 0.9 |
| 531022 | 0 | 0 | 32 | 62 | 77 | 2.2 |
| 531078 | 10 | 27 | 54 | 69 | 92 | 1.1 |
| 531231 | 23 | 30 | 76 | 89 | 94 | 0.6 |

TABLE 154

| ISIS | 0.12 | 0.37 | 1.11 | 3.33 | 10.00 | IC₅₀ |
|---|---|---|---|---|---|---|
| No | μM | μM | μM | μM | μM | (μM) |
| 531026 | 23 | 26 | 49 | 75 | 85 | 1.0 |
| 531055 | 3 | 28 | 64 | 76 | 81 | 0.9 |
| 531069 | 19 | 39 | 48 | 76 | 83 | 0.9 |
| 531071 | 23 | 37 | 56 | 83 | 83 | 0.7 |
| 531110 | 14 | 29 | 49 | 76 | 85 | 1.1 |
| 531121 | 0 | 13 | 47 | 69 | 79 | 1.5 |
| 531123 | 14 | 43 | 51 | 71 | 64 | 0.9 |
| 531172 | 0 | 16 | 37 | 60 | 60 | 2.1 |
| 531198 | 0 | 35 | 62 | 76 | 60 | 0.8 |
| 531231 | 18 | 0 | 36 | 76 | 84 | 2.0 |
| 531232 | 15 | 26 | 40 | 62 | 76 | 1.7 |
| 531233 | 17 | 27 | 50 | 77 | 84 | 1.0 |
| 531234 | 24 | 21 | 47 | 72 | 82 | 1.4 |
| 531235 | 27 | 55 | 62 | 84 | 95 | 0.4 |
| 531236 | 4 | 28 | 59 | 85 | 93 | 0.8 |

### Example 118: Dose-Dependent Antisense Inhibition of Human PKK in HepaRG™ Cells

[1083] Gapmers from the studies described above exhibiting significant in vitro inhibition of PKK mRNA were selected and tested at various doses in HepaRG™ cells. Cells were plated at a density of 20,000 cells per well and transfected using electroporation with 0.19 μM, 0.56 μM, 1.67 μM, and 5.00 μM concentrations of antisense oligonucleotide. After a treatment period of approximately 16 hours, RNA was isolated from the cells and PKK mRNA levels were measured by quantitative real-time PCR. Human PKK primer probe set RTS3454 was used to measure mRNA levels. PKK mRNA levels were adjusted according to total RNA content, as measured by RIBOGREEN®. The antisense oligonucleotides were tested in a series of experiments that had similar culture conditions. The results for each experiment are presented in separate tables shown below. Results are presented as percent inhibition of PKK, relative to untreated control cells. ‘n/a’ indicates that there was no measurement done for that particular antisense oligonucleotide for that particular dose.

[1084] The half maximal inhibitory concentration (IC₅₀) of each oligonucleotide is also presented. PKK mRNA levels were significantly reduced in a dose-dependent manner in antisense oligonucleotide treated cells.

TABLE 155

| ISIS | 0.19 | 0.56 | 1.67 | 5.00 | IC₅₀ |
|---|---|---|---|---|---|
| No | μM | μM | μM | μM | (μM) |
| 531231 | 32 | 30 | 73 | 89 | 0.5 |
| 546158 | 5 | 45 | 79 | 83 | 0.7 |
| 546188 | 36 | 55 | 81 | 83 | 0.4 |
| 546253 | 1 | 13 | 46 | 81 | 1.7 |
| 546254 | 51 | 66 | 80 | 91 | 0.2 |
| 546343 | 28 | 64 | 87 | 87 | 0.4 |
| 546825 | 46 | 73 | 86 | 88 | 0.2 |
| 546827 | 32 | 70 | 84 | 90 | 0.3 |
| 546828 | 39 | 58 | 87 | 93 | 0.3 |
| 546829 | 3 | 30 | 73 | 88 | 1.0 |
| 546846 | 36 | 45 | 71 | 82 | 0.5 |
| 547413 | 0 | 0 | 41 | 83 | 2.2 |
| 547423 | 37 | 50 | 92 | 90 | 0.4 |
| 547445 | 41 | 75 | 82 | 88 | 0.2 |
| 547456 | 12 | 67 | 66 | 80 | 1.0 |
| 547464 | 21 | 52 | 67 | 97 | 0.6 |
| 547564 | 51 | 48 | 82 | 90 | 0.2 |
| 547587 | 20 | 62 | 84 | 86 | 0.5 |
| 548758 | 41 | 47 | 82 | 94 | 0.4 |

TABLE 156

| ISIS | 0.19 | 0.56 | 1.67 | 5.00 | IC₅₀ |
|---|---|---|---|---|---|
| No | μM | μM | μM | μM | (μM) |
| 531231 | 25 | 34 | 84 | 92 | 0.7 |
| 546190 | 33 | 65 | 86 | n/a | 0.4 |
| 546208 | 16 | 45 | 79 | 91 | 0.7 |
| 546216 | 62 | 69 | 88 | 88 | 0.1 |
| 546255 | 32 | 35 | 78 | 87 | 0.5 |
| 546268 | 56 | 50 | 82 | 93 | 0.1 |
| 546301 | 25 | 50 | 53 | 87 | 0.8 |
| 546849 | 23 | 35 | 83 | 91 | 0.7 |
| 546852 | 19 | 40 | 78 | 85 | 0.8 |
| 546889 | 23 | 54 | 78 | 91 | 0.6 |
| 546916 | 43 | 71 | 79 | 89 | 0.2 |
| 546967 | 20 | 39 | 76 | 71 | 0.7 |
| 547273 | 44 | 69 | 87 | 87 | 0.2 |
| 547276 | 35 | 44 | 71 | 77 | 0.6 |
| 547335 | 8 | 52 | 85 | 92 | 0.7 |
| 547340 | 46 | 79 | 88 | n/a | 0.2 |
| 547602 | 18 | 53 | 92 | 87 | 0.5 |
| 547647 | 1 | 70 | 72 | n/a | 0.8 |
| 547694 | 0 | 29 | 67 | 90 | 1.2 |

TABLE 157

| | | | | | IC₅₀ |
|---|---|---|---|---|---|
| ISIS No | 0.19 μM | 0.56 μM | 1.67 μM | 5.00 μM | (μM) |
| 531231 | 58 | 64 | 77 | 98 | 0.1 |
| 546247 | 0 | 29 | 71 | 88 | 1.1 |
| 546251 | 31 | 60 | 99 | 89 | 0.5 |
| 546753 | 28 | 47 | 83 | 96 | 0.5 |
| 546826 | 17 | 40 | 87 | 97 | 0.7 |
| 546833 | 8 | 33 | 74 | 94 | 0.9 |
| 546854 | 23 | 39 | 83 | 94 | 0.6 |
| 546894 | 15 | 47 | 50 | 93 | 0.9 |
| 546897 | 40 | 56 | 71 | 95 | 0.4 |
| 546903 | 15 | 37 | 74 | 98 | 0.8 |
| 546986 | 31 | 49 | 77 | 89 | 0.5 |
| 547293 | 53 | 57 | 80 | 86 | 0.2 |
| 547298 | 32 | 61 | 74 | 90 | 0.4 |
| 547364 | 38 | 47 | 54 | 89 | 0.6 |
| 547373 | 20 | 7 | 49 | 86 | 1.1 |
| 547426 | 19 | 50 | 84 | 93 | 0.6 |
| 547454 | 19 | 40 | 58 | 92 | 0.9 |
| 547617 | 52 | 66 | 77 | 93 | 0.2 |
| 548770 | 26 | 54 | 77 | 91 | 0.5 |

TABLE 158

| | | | | | IC₅₀ |
|---|---|---|---|---|---|
| ISIS No | 0.19 μM | 0.56 μM | 1.67 μM | 5.00 μM | (μM) |
| 531231 | 34 | 47 | 72 | n/a | 0.5 |
| 546214 | 0 | 0 | 68 | 85 | 1.3 |
| 546304 | 0 | 6 | 51 | 71 | 2.1 |
| 546739 | 35 | 55 | 57 | 79 | 0.6 |
| 546832 | 19 | 38 | 70 | 95 | 0.8 |
| 546847 | 39 | 57 | 75 | 89 | 0.4 |
| 546855 | 18 | 7 | 30 | 82 | 2.2 |
| 546877 | 0 | 19 | 75 | 80 | 1.3 |
| 546939 | 1 | 66 | 86 | 90 | 0.6 |
| 547349 | 0 | 8 | 66 | 76 | 1.6 |
| 547360 | 8 | 27 | 76 | 76 | 0.8 |
| 547368 | 0 | 0 | 31 | 80 | 2.5 |
| 547483 | 0 | 9 | 49 | 71 | 2.1 |
| 547575 | 0 | 34 | 82 | 93 | 1.1 |
| 547618 | 0 | 0 | 73 | 98 | 1.3 |
| 547622 | 0 | 47 | 79 | 90 | 0.9 |
| 547637 | 10 | 21 | 36 | 82 | 1.8 |
| 547731 | 0 | 0 | 17 | 56 | 5.0 |
| 548752 | 0 | 0 | 51 | 90 | 1.9 |

TABLE 159

| | | | | | IC₅₀ |
|---|---|---|---|---|---|
| ISIS No | 0.19 μM | 0.56 μM | 1.67 μM | 5.00 μM | (μM) |
| 531231 | 21 | 45 | 67 | 96 | 0.7 |
| 546195 | 34 | 51 | 79 | 92 | 0.5 |
| 546198 | 7 | 3 | 45 | 92 | 1.3 |
| 546287 | 0 | 15 | 39 | 89 | 1.7 |
| 546358 | 0 | 19 | 71 | 80 | 1.3 |
| 546403 | 0 | 20 | 37 | 41 | >5.0 |
| 546410 | 13 | 43 | 52 | 75 | 1.2 |
| 546412 | 0 | 1 | 61 | 62 | 2.3 |
| 546429 | 6 | 10 | 44 | 69 | 2.3 |
| 546834 | 1 | 0 | 30 | 83 | 2.3 |
| 547006 | 0 | 0 | 54 | 77 | 1.5 |
| 547294 | 28 | 59 | 87 | 86 | 0.4 |
| 547337 | 23 | 41 | 55 | 79 | 1.0 |
| 547514 | 18 | 8 | 51 | 80 | 1.9 |
| 547584 | 26 | 34 | 76 | 86 | 0.7 |
| 547585 | 42 | 57 | 70 | 95 | 0.4 |
| 547615 | 20 | 26 | 41 | 84 | 1.4 |
| 547636 | 0 | 24 | 79 | 94 | 1.1 |
| 548744 | 14 | 35 | 63 | 83 | 1.0 |

TABLE 160

| | | | | | IC₅₀ |
|---|---|---|---|---|---|
| ISIS No | 0.19 μM | 0.56 μM | 1.67 μM | 5.00 μM | (μM) |
| 531231 | 21 | 39 | 90 | 97 | 0.6 |
| 546232 | 49 | 50 | 94 | 97 | 0.2 |
| 546248 | 25 | 66 | 87 | 93 | 0.4 |
| 546835 | 9 | 35 | 68 | 93 | 0.9 |
| 546848 | 0 | 18 | 91 | 97 | 1.0 |
| 546853 | 47 | 64 | 84 | n/a | 0.2 |
| 546870 | 35 | 42 | 80 | 95 | 0.5 |
| 546872 | 32 | 33 | 82 | 94 | 0.4 |
| 546876 | 0 | 50 | 85 | 95 | 0.8 |
| 547275 | 34 | 66 | 82 | 95 | 0.3 |
| 547341 | 36 | 58 | 91 | 95 | 0.3 |
| 547366 | 0 | 45 | 68 | 91 | 1.2 |
| 547453 | 25 | 40 | 54 | 92 | 0.8 |
| 547457 | 41 | 65 | 80 | 85 | 0.3 |
| 547616 | 26 | 50 | 72 | 89 | 0.6 |
| 547632 | 44 | 47 | 81 | 97 | 0.6 |
| 547633 | 12 | 46 | 78 | n/a | 0.7 |
| 547718 | 36 | 12 | 69 | 74 | 1.6 |
| 548757 | 18 | 49 | 82 | 93 | 0.6 |

TABLE 161

| | | | | | IC₅₀ |
|---|---|---|---|---|---|
| ISIS No | 0.19 μM | 0.56 μM | 1.67 μM | 5.00 μM | (μM) |
| 531231 | 6 | 38 | 74 | 95 | 0.8 |
| 546291 | 22 | 32 | 34 | 72 | 2.0 |
| 546310 | 0 | 36 | 56 | 80 | 1.3 |
| 546896 | 0 | 45 | 82 | 97 | 0.8 |
| 546980 | 0 | 18 | 29 | 80 | 2.2 |
| 547009 | 0 | 9 | 21 | 63 | 3.6 |
| 547019 | 0 | 6 | 54 | 86 | 1.6 |
| 547277 | 2 | 32 | 34 | 62 | 2.8 |
| 547288 | 0 | 0 | 0 | 38 | >5.0 |
| 547374 | 0 | 15 | 24 | 44 | >5.0 |
| 547493 | 0 | 26 | 64 | 77 | 1.3 |
| 547520 | 0 | 25 | 66 | 64 | 1.1 |
| 547712 | 0 | 5 | 21 | 62 | 3.8 |
| 547722 | 0 | 15 | 32 | 73 | 2.4 |
| 547728 | 0 | 2 | 16 | 61 | 4.4 |
| 547780 | 0 | 10 | 36 | 55 | 3.9 |
| 548743 | 25 | 57 | 73 | 88 | 0.5 |
| 548753 | 0 | 23 | 49 | 84 | 1.5 |
| 548756 | 0 | 4 | 16 | 86 | >5.0 |

TABLE 162

| | | | | | IC₅₀ |
|---|---|---|---|---|---|
| ISIS No | 0.19 μM | 0.56 μM | 1.67 μM | 5.00 μM | (μM) |
| 531231 | 25 | 55 | 89 | 97 | 0.5 |
| 546188 | 27 | 69 | 88 | 97 | 0.4 |
| 546216 | 23 | 78 | 95 | 98 | <0.2 |
| 546254 | 40 | 63 | 84 | 95 | 0.3 |
| 546268 | 0 | 71 | 92 | 92 | 0.5 |
| 546343 | 37 | 32 | 83 | 95 | 0.4 |
| 546825 | 38 | 82 | n/a | 99 | 0.2 |
| 546827 | 23 | 74 | 98 | 96 | 0.4 |
| 546828 | 0 | 64 | 89 | 97 | 0.2 |
| 546846 | 26 | 49 | 85 | n/a | 0.5 |
| 546967 | 22 | 45 | 74 | 92 | 0.7 |
| 547273 | 0 | 60 | 82 | 83 | 0.6 |
| 547340 | 34 | 84 | 96 | n/a | 0.3 |
| 547423 | 78 | 92 | n/a | n/a | <0.2 |
| 547445 | 80 | 87 | 98 | 91 | <0.2 |
| 547564 | 46 | 66 | 90 | 97 | 0.2 |
| 547587 | 38 | 64 | 91 | 97 | 0.3 |
| 547602 | 1 | 9 | 52 | 93 | 1.4 |
| 548758 | 0 | 72 | 79 | n/a | 0.6 |

TABLE 163

| | | | | | IC₅₀ |
|---|---|---|---|---|---|
| ISIS No | 0.19 μM | 0.56 μM | 1.67 μM | 5.00 μM | (μM) |
| 531231 | 7 | 39 | 56 | 97 | 1.0 |
| 546190 | 21 | 34 | 76 | 98 | 0.7 |
| 546208 | 5 | 33 | 70 | 97 | 0.9 |
| 546251 | 19 | 45 | 91 | 97 | 0.6 |
| 546255 | 5 | 39 | 82 | 96 | 0.8 |
| 546739 | 4 | 62 | 84 | 86 | 0.6 |
| 546753 | 17 | 31 | 70 | 91 | 0.9 |
| 546849 | 13 | 45 | 84 | 98 | 0.7 |
| 546889 | 25 | 9 | 73 | 92 | 1.4 |
| 546897 | 16 | 17 | 69 | 97 | 0.8 |
| 546916 | 0 | 27 | 73 | 97 | 1.0 |
| 546986 | 7 | 28 | 69 | 86 | 1.1 |
| 547276 | 6 | 3 | 53 | 68 | 2.2 |
| 547293 | 0 | 45 | 65 | 70 | 1.3 |
| 547298 | 0 | 12 | 67 | 87 | 1.7 |
| 547335 | 0 | 13 | 73 | 95 | 1.3 |
| 547426 | 18 | 35 | 80 | 95 | 0.7 |
| 547617 | 17 | 37 | 79 | 98 | 0.7 |
| 548770 | 9 | 0 | 61 | 92 | 1.7 |

TABLE 164

| | | | | | IC₅₀ |
|---|---|---|---|---|---|
| ISIS No | 0.19 μM | 0.56 μM | 1.67 μM | 5.00 μM | (μM) |
| 531231 | 6 | 56 | 68 | 97 | 0.8 |
| 546195 | 0 | 27 | 91 | 94 | 0.9 |
| 546232 | 0 | 74 | 95 | 96 | 0.2 |
| 546248 | 0 | 59 | 73 | 89 | 0.8 |
| 546832 | 36 | 49 | 85 | 97 | 0.4 |
| 546847 | 14 | 44 | 83 | 95 | 0.7 |
| 546853 | 4 | 49 | 74 | 92 | 0.8 |
| 546870 | 36 | 34 | 61 | 91 | 1.0 |
| 546872 | 42 | 13 | 59 | 99 | 1.4 |
| 546896 | 35 | 60 | 83 | n/a | 0.4 |
| 546939 | 16 | 71 | 96 | 95 | 0.4 |
| 547275 | 56 | 16 | 80 | 86 | 1.2 |
| 547294 | 4 | 70 | 84 | 91 | 0.6 |
| 547341 | 45 | 44 | 81 | 95 | 0.6 |
| 547457 | 33 | 42 | 70 | 83 | 0.6 |
| 547584 | 0 | 21 | 64 | 92 | 1.3 |
| 547585 | 0 | 46 | 89 | 93 | 0.8 |
| 547632 | 0 | 0 | 63 | 91 | 1.6 |
| 548743 | 22 | 47 | 74 | 96 | 0.6 |

### Example 119: Dose-Dependent Antisense Inhibition of Human PKK in HepaRG™ Cells

[1085] Gapmers from the studies described above exhibiting significant in vitro inhibition of PKK mRNA were selected and tested at various doses in HepaRG™ cells. Cells were plated at a density of 20,000 cells per well and transfected using electroporation with 0.11 μM, 0.33 μM, 1.00 μM, and 3.00 μM concentrations of antisense oligonucleotide. After a treatment period of approximately 16 hours, RNA was isolated from the cells and PKK mRNA levels were measured by quantitative real-time PCR. Human PKK primer probe set RTS3454 was used to measure mRNA levels. PKK mRNA levels were adjusted according to total RNA content, as measured by RIBOGREEN®. The antisense oligonucleotides were tested in a series of experiments that had similar culture conditions. The results for each experiment are presented in separate tables shown below. Results are presented as percent inhibition of PKK, relative to untreated control cells. ‘n/a’ indicates that there was no measurement done for that particular antisense oligonucleotide for that particular dose.

[1086] The half maximal inhibitory concentration (IC₅₀) of each oligonucleotide is also presented. PKK mRNA levels were significantly reduced in a dose-dependent manner in antisense oligonucleotide treated cells.

TABLE 165

| | | | | | IC₅₀ |
|---|---|---|---|---|---|
| ISIS No | 0.11 μM | 0.33 μM | 1.00 μM | 3.00 μM | (μM) |
| 547747 | 24 | 29 | 81 | 89 | 0.4 |
| 547769 | 12 | 17 | 80 | 96 | 0.6 |
| 547824 | 45 | 73 | 78 | n/a | 0.1 |
| 547835 | 44 | 27 | 53 | 79 | 0.9 |
| 547843 | 0 | 52 | 80 | 91 | 0.4 |
| 547857 | 36 | 66 | 77 | 93 | 0.2 |
| 547870 | 0 | 44 | 80 | 97 | 0.6 |
| 547943 | 33 | 70 | 87 | 90 | 0.2 |
| 547946 | 0 | 47 | 74 | n/a | 0.5 |
| 547947 | 24 | 58 | 81 | 93 | 0.3 |
| 547998 | 55 | 73 | 91 | 91 | 0.1 |
| 548004 | 24 | 47 | 80 | 92 | 0.3 |
| 548010 | 0 | 11 | 49 | 64 | 1.4 |
| 548047 | 50 | 62 | 76 | 95 | 0.1 |
| 548147 | 59 | 94 | 80 | n/a | 0.0 |
| 548338 | 41 | 58 | 79 | 95 | 0.2 |
| 548348 | 19 | 46 | 67 | 91 | 0.4 |
| 548409 | 21 | 60 | 90 | 93 | 0.3 |
| 548557 | 5 | 47 | 82 | 95 | 0.4 |

TABLE 166

| | | | | | IC₅₀ |
|---|---|---|---|---|---|
| ISIS No | 0.11 μM | 0.33 μM | 1.00 μM | 3.00 μM | (μM) |
| 547747 | 8 | 61 | 90 | 92 | 0.3 |
| 547807 | 26 | 71 | 61 | 94 | 0.4 |
| 547922 | 67 | 75 | 81 | 92 | 0.0 |
| 547927 | 56 | 64 | 92 | 88 | 0.1 |
| 547948 | 60 | 80 | 88 | 97 | 0.0 |
| 547979 | 56 | 58 | 94 | 97 | 0.1 |
| 548005 | 53 | 49 | 71 | 95 | 0.4 |
| 548024 | 28 | 57 | 84 | 82 | 0.3 |
| 548043 | 14 | 60 | 90 | 92 | 0.3 |
| 548055 | 43 | 57 | 50 | 88 | 0.3 |
| 548106 | 53 | 54 | 82 | 94 | 0.1 |
| 548109 | 50 | 92 | 79 | 85 | 0.1 |
| 548155 | 49 | 50 | 70 | 81 | 0.3 |
| 548180 | 11 | 59 | 71 | 88 | 0.4 |
| 548278 | 3 | 59 | 78 | 93 | 0.4 |
| 548343 | 61 | 67 | 88 | 92 | 0.0 |
| 548558 | 53 | 61 | 78 | 95 | 0.1 |
| 548570 | 20 | 40 | 70 | 94 | 0.4 |
| 548583 | 43 | 46 | 93 | 88 | 0.2 |

TABLE 167

| | | | | | IC₅₀ |
|---|---|---|---|---|---|
| ISIS No | 0.11 μM | 0.33 μM | 1.00 μM | 3.00 μM | (μM) |
| 547747 | 3 | 44 | 72 | 90 | 0.5 |
| 547849 | 36 | 52 | 67 | n/a | 0.3 |
| 547851 | 16 | 46 | 83 | n/a | 0.4 |
| 547859 | 29 | 56 | 83 | 78 | 0.3 |
| 547862 | 26 | 71 | 69 | n/a | 0.3 |
| 547877 | 29 | 66 | 83 | n/a | 0.2 |
| 547942 | 25 | 51 | 91 | n/a | 0.3 |
| 547997 | 39 | 68 | n/a | 82 | 0.2 |
| 548046 | 7 | 35 | 64 | 77 | 0.7 |
| 548048 | 49 | 66 | 86 | 92 | 0.1 |
| 548061 | 26 | 61 | 59 | n/a | 0.4 |
| 548070 | 26 | 35 | 48 | 63 | 1.1 |
| 548125 | 33 | 50 | 81 | 73 | 0.3 |
| 548195 | 5 | 23 | 61 | 76 | 0.8 |
| 548265 | 47 | 69 | 78 | 67 | 0.1 |
| 548410 | 31 | 58 | 85 | 82 | 0.2 |
| 548424 | 17 | 67 | 86 | 72 | 0.3 |
| 548425 | 41 | 57 | 68 | 80 | 0.2 |
| 548547 | 30 | 41 | 76 | 90 | 0.4 |

TABLE 168

| | | | | | IC₅₀ |
|---|---|---|---|---|---|
| ISIS No | 0.11 μM | 0.33 μM | 1.00 μM | 3.00 μM | (μM) |
| 547747 | 16 | 59 | 85 | 96 | 0.3 |
| 547808 | 19 | 22 | 48 | 71 | 1.1 |
| 547861 | 7 | 40 | 75 | 84 | 0.5 |
| 548069 | 6 | 0 | 27 | 66 | 1.9 |
| 548128 | 14 | 29 | 49 | 66 | 1.1 |
| 548170 | 0 | 8 | 26 | 65 | 2.0 |
| 548174 | 20 | 18 | 29 | 62 | 2.0 |
| 548197 | 33 | 37 | 51 | 75 | 0.8 |
| 548201 | 0 | 7 | 70 | 85 | 0.8 |
| 548217 | 22 | 24 | 54 | 71 | 0.9 |
| 548220 | 0 | 0 | 0 | 6 | >3 |
| 548247 | 16 | 50 | 62 | 82 | 0.5 |
| 548422 | 0 | 32 | 71 | 93 | 0.7 |
| 548479 | 2 | 52 | 82 | 97 | 0.4 |
| 548486 | 20 | 48 | 77 | 92 | 0.4 |
| 548521 | 21 | 0 | 3 | 1 | >3 |
| 548655 | 0 | 0 | 8 | 33 | >3 |
| 548667 | 0 | 37 | 73 | 86 | 0.7 |
| 548668 | 10 | 30 | 61 | 84 | 0.7 |

### Example 120: Efficacy of Antisense Oligonucleotides Targeting Human PKK in Transgenic Mice

[1087] Transgenic mice containing a 37,390 base pair fragment of the human KLKB1 gene sequence (chromosome 4: position 187148672-187179625, accession no: NC_000004.11) were treated with ISIS antisense oligonucleotides selected from studies described above, which were evaluated for efficacy in this model.

### Treatment

[1088] Groups of transgenic mice were injected subcutaneously twice a week for 3 weeks with 2.5 mg/kg/week, 5.0 mg/kg/week, 10 mg/kg/week or 20 mg/kg/week of ISIS 546232, ISIS 546251, ISIS 546254, ISIS 546343, ISIS 546828, ISIS 547455, ISIS 547457, ISIS 547927, and ISIS 548048. One group of transgenic mice was injected subcutaneously twice a week for 3 weeks with PBS. Mice were euthanized 48 hours after the last dose, and organs and plasma were harvested for further analysis.

### RNA Analysis

[1089] To evaluate the effect of ISIS oligonucleotides on target reduction, RNA was extracted from liver tissue for real-time PCR analysis of human PKK. Results are presented as percent inhibition of PKK mRNA, relative to PBS control. As shown in Table 169, treatment with ISIS antisense oligonucleotides resulted in significant reduction of PKK mRNA in comparison to the PBS control.

TABLE 169
Percent Inhibition of PKK mRNA in the
transgenic mice liver relative to the PBS control

| | | % |
|---|---|---|
| ISIS No | Dose | inhibition |
| 547927 | 20 | 71 |
| | 10 | 93 |
| | 5 | 52 |
| | 2.5 | 35 |
| 547455 | 20 | 62 |
| | 10 | 45 |
| | 5 | 69 |
| | 2.5 | 0 |
| 546232 | 20 | 84 |
| | 10 | 30 |
| | 5 | 53 |
| | 2.5 | 57 |
| 546254 | 20 | 83 |
| | 10 | 84 |
| | 5 | 55 |
| | 2.5 | 31 |
| 546343 | 20 | 86 |
| | 10 | 66 |
| | 5 | n/a |
| | 2.5 | 46 |
| 548048 | 20 | 80 |
| | 10 | 72 |
| | 5 | 77 |
| | 2.5 | 7 |
| 546828 | 20 | 83 |
| | 10 | 32 |
| | 5 | 62 |
| | 2.5 | 77 |
| 546251 | 20 | 79 |
| | 10 | 66 |
| | 5 | 51 |
| | 2.5 | 13 |
| 547457 | 20 | 62 |
| | 10 | 45 |
| | 5 | 69 |
| | 2.5 | 0 |

### Protein Analysis

[1090] Plasma PKK protein levels were evaluated in all groups. Results are presented as percent inhibition of PKK protein, relative to PBS control. As shown in Table 170, treatment with ISIS antisense oligonucleotides resulted in significant reduction of PKK protein levels in comparison to the PBS control.

TABLE 170
Percent reduction of PKK protein levels in the
transgenic mice relative to the PBS control

| | | % |
|---|---|---|
| ISIS No | Dose | inhibition |
| 547927 | 20 | 80 |
| | 10 | n/a |
| | 5 | 21 |
| | 2.5 | 25 |
| 547455 | 20 | 78 |
| | 10 | 32 |
| | 5 | 0 |
| | 2.5 | 0 |
| 546232 | 20 | 79 |
| | 10 | 33 |
| | 5 | 6 |
| | 2.5 | 0 |
| 546254 | 20 | 76 |
| | 10 | 51 |
| | 5 | 36 |
| | 2.5 | 0 |
| 546343 | 20 | 79 |
| | 10 | 38 |
| | 5 | n/a |
| | 2.5 | 0 |
| 548048 | 20 | 98 |
| | 10 | 89 |
| | 5 | 70 |
| | 2.5 | 23 |
| 546828 | 20 | 93 |
| | 10 | 36 |
| | 5 | 25 |
| | 2.5 | 0 |
| 546251 | 20 | 69 |
| | 10 | 52 |
| | 5 | 30 |
| | 2.5 | 22 |
| 547457 | 20 | 60 |
| | 10 | 31 |
| | 5 | 4 |
| | 2.5 | 0 |

### Example 121: Effect of ISIS Antisense Oligonucleotides Targeting Human PKK in Cynomolgus Monkeys

[1091] Cynomolgus monkeys were treated with ISIS antisense oligonucleotides selected from studies described above. Antisense oligonucleotide efficacy and tolerability were evaluated. The human antisense oligonucleotides tested are cross-reactive with the rhesus genomic sequence (GENBANK Accession No. NW_001118167.1 truncated from nucleotides 2358000 to 2391000 and designated herein as SEQ ID NO: 18). The target start site of each oligonucleotide to SEQ ID NO: 18 is presented in Table 171. ‘Mismatches’ indicates that the number of nucleotides by which the oligonucleotide is mismatched to the rhesus sequence. The greater the complementarity between the human oligonucleotide and the rhesus monkey sequence, the more likely the human oligonucleotide can cross-react with the rhesus monkey sequence. ‘n/a’ indicates that the oligonucleotide is has more than 3 mismatches with the rhesus gene sequence.

TABLE 171
Antisense oligonucleotides
complementary to SEQ ID NO: 18

| | Target | | | | SEQ |
|---|---|---|---|---|---|
| | Start | Mis- | | | ID |
| ISIS No | Site | matches | Sequence | Chemistry | NO. |
| 547927 | 22059 | 1 | ATGGTCCGAC | Deoxy, MOE | 1548 |
| | | | ACACAA | and cEt | |
| 546232 | n/a | n/a | AGGAACTTGG | 5-10-5 MOE | 526 |
| | | | TGTGCCACTT | | |
| 547455 | 27391 | 0 | ATATCATGAT | 5-10-5 MOE | 657 |
| | | | TCCCTTCTGA | | |
| 546254 | 23858 | 1 | TGCAAGTCTC | 5-10-5 MOE | 570 |
| | | | TTGGCAAACA | | |
| 546343 | 30532 | 0 | CCCCCTTCTT | 5-10-5 MOE | 705 |
| | | | TATAGCCAGC | | |
| 548048 | 27397 | 0 | CGATATCATG | Deoxy, MOE | 1666 |
| | | | ATTCCC | and cEt | |
| 546828 | 13632 | 1 | ACAGTATCAC | 5-10-5 MOE | 904 |
| | | | TGTACTAGTT | | |
| 546251 | 23846 | 0 | GGCAAACATT | 5-10-5 MOE | 566 |
| | | | CACTCCTTTA | | |
| 547457 | 27397 | 0 | AAGGCGATAT | 5-10-5 MOE | 660 |
| | | | CATGATTCCC | | |

### Treatment

[1092] Prior to the study, the monkeys were kept in quarantine for a 30-day period, during which the animals were observed daily for general health. The monkeys were 2-4 years old and weighed between 2 and 4 kg. Ten groups of four randomly assigned male cynomolgus monkeys each were injected subcutaneously with ISIS oligonucleotide or PBS. PBS solution or ISIS oligonucleotides at a dose of 40 mg/kg were administered initially with a loading regimen consisting of four doses on the first week of the study (days 1, 3, 5, and 7), followed by a maintenance regimen consisting of once weekly administration starting on Day 14 (weeks 2 to 13). Subcutaneous injections were performed in clock-wise rotations at 4 sites on the back; one site per dose. The injection sites were delineated by tattoo, while sedated using ketamine, and were separated by a minimum of 3 cm.

[1093] During the study period, the monkeys were observed a minimum of once daily for signs of illness or distress. Any animal experiencing more than momentary or slight pain or distress due to the treatment, injury or illness was promptly reported to the responsible veterinarian and the Study Director. Any animal in poor health or in a possible moribund condition was identified for further monitoring and possible euthanasia. For example, two monkeys treated with ISIS 547445 were euthanized due to subdued behavior, lateral position, lack of response to stimuli and decreased respiration. The protocols described in the Example were approved by the Institutional Animal Care and Use Committee (IACUC).

### Target Reduction

### RNA Analysis

[1094] On day 87 or 88, 48 hours after the final dose, RNA was extracted from liver tissue for real-time PCR analysis of PKK using primer probe set RTS3455 (forward sequence CCTGTGTGGAGGGTCACTCA, designated herein as SEQ ID NO: 23; reverse sequence CCACTATAGATGCGCCAAACATC, designated herein as SEQ ID NO: 24; probe sequence CCCACTGCTTTGATGGGCTTCCC, designated herein as SEQ ID NO: 25). The results were normalized to the housekeeping gene, Cyclophilin. Results are presented as percent inhibition of PKK mRNA, relative to PBS control. As shown in Table 172, treatment with ISIS antisense oligonucleotides resulted in significant reduction of PKK mRNA in comparison to the PBS control.

TABLE 172
Percent Inhibition of PKK mRNA in the
cynomolgus monkey liver relative to the PBS control

| | % |
|---|---|
| ISIS No | inhibition |
| 546232 | 88 |
| 546251 | 90 |
| 546254 | 88 |
| 546343 | 74 |
| 546828 | 45 |
| 547455 | 90 |
| 547457 | 89 |
| 547927 | 54 |
| 548048 | 95 |

### Protein Analysis

[1095] Approximately 0.9 mL of blood was collected each time from all available animals at pre-dose, day 17, day 31, day 45, day 59, and day 73, and placed in tubes containing 3.2% sodium citrate. The tubes were centrifuged (3000 rpm for 10 min at room temperature) to obtain plasma. PKK protein levels were measured in the plasma by ELISA. The results are presented in Table 173, expressed as percentage inhibition compared to the PBS control levels. The results indicate that ISIS oligonucleotides significantly reduced PKK protein levels.

TABLE 173
PKK protein level reduction (%) in the cynomolgus monkey plasma
relative to control levels

| | Day 17 | Day 31 | Day 45 | Day 59 | Day 73 |
|---|---|---|---|---|---|
| ISIS 546232 | 53 | 58 | 72 | 75 | 70 |
| ISIS 546251 | 71 | 75 | 75 | 81 | 77 |
| ISIS 546254 | 38 | 51 | 63 | 74 | 73 |
| ISIS 546343 | 56 | 74 | 69 | 70 | 70 |
| ISIS 546828 | 0 | 8 | 23 | 39 | 39 |
| ISIS 547455 | 26 | 33 | 43 | 58 | 58 |
| ISIS 547457 | 68 | 75 | 79 | 76 | 80 |
| ISIS 547927 | 8 | 0 | 15 | 10 | 18 |
| ISIS 548048 | 90 | 93 | 95 | 95 | 95 |

### Tolerability Studies

### Liver Function

[1096] To evaluate the effect of ISIS oligonucleotides on hepatic function, the monkeys were fasted overnight. Approximately, 1.5 mL of blood samples were collected from all the study groups. Blood was collected in tubes without anticoagulant for serum separation. The tubes were kept at room temperature for a minimum of 90 min and then centrifuged at 3,000 rpm for 10 min. Levels of various liver function markers were measured using a Toshiba 120FR NEO chemistry analyzer (Toshiba Co., Japan). The results are presented in Table 174 and indicate that antisense oligonucleotides had no effect on liver function outside the expected range for antisense oligonucleotides.

TABLE 174
Liver function markers in cynomolgus monkey plasma

| | Albumin | AST | ALT |
|---|---|---|---|
| | (g/dL) | (IU/L) | (IU/L) |
| PBS | 4.2 | 48 | 60 |
| ISIS 546232 | 4.1 | 63 | 140 |
| ISIS 546251 | 3.7 | 51 | 58 |
| ISIS 546254 | 3.8 | 68 | 54 |
| ISIS 546343 | 4.3 | 49 | 76 |
| ISIS 546828 | 3.7 | 75 | 67 |
| ISIS 547455 | 3.8 | 56 | 61 |
| ISIS 547457 | 4.0 | 54 | 52 |
| ISIS 547927 | 4.2 | 59 | 61 |
| ISIS 548048 | 4.2 | 44 | 47 |

### Hematology

[1097] To evaluate any effect of ISIS oligonucleotides in cynomolgus monkeys on hematologic parameters, blood samples of approximately 1.2 mL of blood was collected pre-dose and on day 87 or day 88 from each of the available study animals in tubes containing K₂-EDTA. Samples were analyzed for red blood cell (RBC) count, white blood cells (WBC) count, platelet count, hemoglobin content and hematocrit, using an ADVIA2120i hematology analyzer (SIEMENS, USA). The data is presented in Table 175.

[1098] The data indicate treatment with most of the oligonucleotides did not cause any changes in hematologic parameters outside the expected range for antisense oligonucleotides at this dose.

TABLE 175
Hematological parameters in cynomolgus monkeys

| | RBC | Platelets | WBC | Hemoglobin | HCT |
|---|---|---|---|---|---|
| | (×10⁶/μL) | (×10³/μL) | (×10³/μL) | (g/dL) | (%) |
| PBS | 5.4 | 458 | 13 | 13.1 | 43 |
| ISIS 546232 | 5.4 | 391 | 11 | 12.9 | 42 |
| ISIS 546251 | 5.7 | 419 | 8 | 12.9 | 43 |
| ISIS 546254 | 5.3 | 436 | 11 | 12.4 | 41 |
| ISIS 546343 | 5.5 | 373 | 14 | 12.6 | 42 |
| ISIS 546828 | 6.0 | 408 | 11 | 12.9 | 43 |
| ISIS 547455 | 4.5 | 448 | 13 | 10.2 | 34 |
| ISIS 547457 | 6.4 | 367 | 10 | 13.8 | 45 |
| ISIS 547927 | 5.2 | 461 | 45 | 12.5 | 41 |
| ISIS 548048 | 5.9 | 393 | 11 | 13.4 | 44 |

### Kidney Function

[1099] To evaluate the effect of ISIS oligonucleotides on kidney function, the monkeys were fasted overnight. Approximately, 1.5 mL of blood samples were collected from all the study groups. Blood was collected in tubes without anticoagulant for serum separation. The tubes were kept at room temperature for a minimum of 90 min and then centrifuged at 3,000 rpm for 10 min. Levels of BUN and creatinine were measured using a Toshiba 120FR NEO chemistry analyzer (Toshiba Co., Japan). Results are presented in Table 176, expressed in mg/dL. The plasma chemistry data indicate that most of the ISIS oligonucleotides did not have any effect on the kidney function outside the expected range for antisense oligonucleotides. Specifically, treatment with ISIS 546254 was well tolerated in terms of the kidney function of the monkeys.

[1100] Kidney function was also assessed by urinalysis. Fresh urine from all animals was collected using a clean cage pan on wet ice. Food was removed overnight the day before fresh urine collection was done but water was supplied. The total protein and creatinine levels were measured using a Toshiba 120FR NEO automated chemistry analyzer (Toshiba Co., Japan) and the protein to creatinine ratio was calculated. The results are presented in Table 177.

TABLE 176
Plasma BUN and creatinine levels (mg/dL) in cynomolgus monkeys

| | BUN | Creatinine |
|---|---|---|
| PBS | 22.8 | 0.9 |
| ISIS 546232 | 22.7 | 1.0 |
| ISIS 546251 | 25.4 | 1.1 |
| ISIS 546254 | 25.7 | 0.9 |
| ISIS 546343 | 26.2 | 1.0 |
| ISIS 546828 | 24.7 | 0.9 |
| ISIS 547455 | 29.4 | 0.9 |
| ISIS 547457 | 24.3 | 1.0 |
| ISIS 547927 | 22.3 | 1.0 |
| ISIS 548048 | 21.9 | 0.9 |

TABLE 177
Urine protein/creatinine ratio in cynomolgus monkeys

| | Ratio |
|---|---|
| ISIS 546232 | 0.03 |
| ISIS 546251 | 0.12 |
| ISIS 546254 | 0.04 |
| ISIS 546343 | 0.01 |
| ISIS 546828 | 0.03 |
| ISIS 547455 | 0.70 |
| ISIS 547457 | 0.03 |
| ISIS 547927 | 0.04 |
| ISIS 548048 | 0.03 |
| PBS | 0.06 |

### C-Reactive Protein Level Analysis

[1101] To evaluate any inflammatory effect of ISIS oligonucleotides in cynomolgus monkeys, the monkeys were fasted overnight. Approximately, 1.5 mL of blood samples were collected from all the study groups. Blood was collected in tubes without anticoagulant for serum separation. The tubes were kept at room temperature for a minimum of 90 min and then centrifuged at 3,000 rpm for 10 min. C-reactive protein (CRP), which is synthesized in the liver and which serves as a marker of inflammation, was measured using a Toshiba 120FR NEO chemistry analyzer (Toshiba Co., Japan). Complement C3 was also measured similarly, and the data is presented as a percentage of baseline values. The results are presented in Table 178 and indicate that treatment with ISIS oligonucleotides did not cause any inflammation in monkeys.

TABLE 178
C-reactive protein and C3 levels in cynomolgus monkey plasma

| | CRP | C3 |
|---|---|---|
| | (mg/dL) | (% of baseline) |
| PBS | 0.2 | 73 |
| ISIS 546232 | 0.5 | 50 |
| ISIS 546251 | 0.7 | 62 |
| ISIS 546254 | 0.8 | 61 |
| ISIS 546343 | 0.2 | 60 |
| ISIS 546828 | 0.6 | 56 |
| ISIS 547455 | 1.9 | 64 |
| ISIS 547457 | 0.3 | 53 |
| ISIS 547927 | 0.2 | 73 |
| ISIS 548048 | 0.2 | 69 |

### Example 122: Antisense Inhibition of Murine PKK mRNA in Mouse Primary Hepatocytes

[1102] Antisense oligonucleotides targeting a murine PKK nucleic acid were designed and tested for their effects on PKK mRNA in vitro. Cultured mouse primary hepatocytes at a density of 10,000 cells per well were transfected using Cytofectin reagent with 12.5 nM, 25.0 nM, 50.0 nM, 100.0 nM, and 200.0 nM of antisense oligonucleotide. After a treatment period of approximately 24 hours, RNA was isolated from the cells and mouse PKK mRNA levels were measured by quantitative real-time PCR using the murine primer probe set RTS3313 (forward sequence TGCCTGCTGTTCAGCTTTCTC, designated herein as SEQ ID NO: 2228; reverse sequence TGGCAAAGTCCCTGTAATGCT, designated herein as SEQ ID NO: 2229; probe sequence CGTGACTCCACCCAAAGAGACAAATAAACG, designated herein as SEQ ID NO: 2230). PKK mRNA levels were adjusted according to total RNA content, as measured by RIBOGREEN.

[1103] The chimeric antisense oligonucleotides were designed as 5-10-5 MOE gapmers. The gapmers are 20 nucleotides in length, wherein the central gap segment is comprised often 2′-deoxynucleosides and is flanked on both sides (in the 5′ and 3′ directions) by wings comprising 5 nucleosides each. Each nucleoside in the 5′ wing segment and each nucleoside in the 3′ wing segment has a 2′-O-methoxyethyl modification. The internucleoside linkages throughout each gapmer are phosphorothioate linkages. All cytosine residues throughout each gapmer are 5-methylcytosines. Results demonstrate that PKK mRNA levels were significantly reduced in a dose dependent manner.

[1104] In one specific example, ISIS 482584 (GGCATATTGGTTTTTGGAAT; SEQ ID NO: 2244) reduced PKK mRNA in a dose dependent manner yielding a half maximal inhibitory concentration (IC₅₀) of 84 nM (see Table 179). ISIS 482584 is targeted to SEQ ID NO: 11 (GENBANK Accession No. NM_008455.2) and has a target start site of 1586 and a target stop site of 1605. “Target start site” indicates the 5′-most nucleotide to which the gapmer is targeted. “Target stop site” indicates the 3′-most nucleotide to which the gapmer is targeted.

TABLE 179
Dose-dependent inhibition of mouse PKK mRNA levels
by ISIS 482584

| Dose | % inhibition |
|---|---|
| 12.5 nM | 0 |
| 25.0 nM | 47 |
| 50.0 nM | 27 |
| 100.0 nM | 60 |
| 200.0 nM | 82 |

### Example 123: Antisense Inhibition of PKK mRNA in BALB/c Mice

[1105] ISIS 482584 was tested for its effect on murine PKK mRNA in vivo.

### Treatment

[1106] Six groups of male BALB/c mice each were treated with 2.5 mg/kg, 5.0 mg/kg, 10.0 mg/kg, 20.0 mg/kg, 40.0 mg/kg, or 80.0 mg/kg of ISIS 482584, administered subcutaneously twice a week for 3 weeks (weekly doses of 5.0 mg/kg, 10.0 mg/kg, 20.0 mg/kg, 40.0 mg/kg, 80.0 mg/kg, or 160.0 mg/kg). A control group of BALB/c mice was treated with PBS, administered subcutaneously twice a week for 3 weeks. Two days after the last dose of antisense oligonucleotide or PBS, mice from all groups were anesthetized with 150 mg/kg ketamine mixed with 10 mg/kg xylazine, administered by intraperitoneal injection. Liver was collected for RNA analysis.

### RNA Analysis

[1107] RNA was extracted from liver tissue for real-time PCR analysis of PKK. PKK mRNA levels were measured using the murine primer probe set (forward sequence ACAAGTGCATTTTACAGACCAGAGTAC, designated herein as SEQ ID NO: 2231; reverse sequence GGTTGTCCGCTGACTTTATGCT, designated herein as SEQ ID NO: 2232; probe sequence AAGCACAGTGCAAGCGGAACACCC, designated herein as SEQ ID NO: 2233). Results are presented as percent inhibition of PKK, relative to PBS control. As shown in Table 180, treatment with ISIS 482584 resulted in significant dose-dependent reduction of PKK mRNA in comparison to the PBS control.

TABLE 180
Dose-dependent reduction of PKK mRNA in BALB/c mice liver

| Dose | % |
|---|---|
| (mg/kg/wk) | inhibition |
| 5 | 3 |
| 10 | 42 |
| 20 | 68 |
| 40 | 85 |
| 80 | 91 |
| 160 | 94 |

### Protein Analysis

[1108] Plasma was collected in tubes containing sodium citrate as an anticoagulant. The samples were run on a 4-12% gradient SDS-polyacrylamide gel (Invitrogen), followed by immunoblotting with murine PKK antibody (R&D Systems). Blots were incubated with secondary fluorophore-labeled antibodies (LI-COR) and imaged in an Odyssey Imager (LI-COR). Results are presented as percent inhibition of PKK, relative to PBS control. As shown in Table 181, treatment with ISIS 482584 resulted in significant dose-dependent reduction of PKK plasma protein in comparison to the PBS control.

TABLE 181
Dose-dependent reduction of PKK protein in BALB/c mice plasma

| Dose | % |
|---|---|
| (mg/kg/wk) | inhibition |
| 5 | 5 |
| 10 | 24 |
| 20 | 47 |
| 40 | 76 |
| 80 | 81 |
| 160 | n.d. |

n.d. = no data

### Example 124: In Vivo Effect of Antisense Inhibition of Murine PKK in an Angioedema Mouse Model

[1109] Hereditary angioedema (HAE) is characterized by local swelling and increase in vascular permeability in subcutaneous tissues (Morgan, B. P. N. Engl. J. Med. 363: 581-83, 2010). It is caused by a deficiency of the C₁ inhibitor, a protein of the complement system. Two mouse models were used in this study including an established mouse model of C1-INH deficiency and a captopril-induced edema model, both of which cause vascular permeability, a hallmark of HAE. Reversal of vascular permeability is accompanied by increased plasma levels of high molecular weight kininogen (HMWK).

[1110] In the first model, angioedema was induced by treatment with Captopril, a known antihypertensive agent, which increases vascular permeability in mice and replicates the pathology of hereditary angioedema.

[1111] In the second model, angioedema was induced by treatment with ISIS 461756, an antisense oligonucleotide which targets murine C₁ inhibitor mRNA, which increases vascular permeability in mice and replicates the pathology of hereditary angioedema. ISIS 461756 (SEQ ID NO: 2245; AAAGTGGTTGATACCCTGGG) is a 5-10-5 MOE gapmer targeting nucleosides 1730-1749 of NM_009776.3 (SEQ ID NO: 2243).

[1112] The effect of HOE-140 and ISIS 482584, an antisense oligonucleotide inhibitor of PKK, were evaluated in the Captopril and ISIS 461756-induced mouse models of vascular permeability. Some of the murine groups were treated with HOE-140, a selective antagonist of the bradykinin B2 receptor, which blocks vasodilation and vascular permeability (Cruden and Newby, Expert Opin. Pharmacol. 9: 2383-90, 2008). Other mice were treated with ISIS 482584, which inhibits PKK mRNA expression. The effect of treatment with HOE-140 was compared with the effect of treatment with ISIS 482584.

### Treatment

[1113] The various treatment groups for this assay are presented in Table 182.

[1114] Group 1 consisted of 4 C57BL/6J-Tyrc-2J mice treated with PBS administered subcutaneously twice a week for 4 weeks. No other treatment was administered to Group 1 which served as a control group to measure the basal level of vascular permeability.

[1115] Group 2 consisted of 8 C57BL/6J-Tyrc-2J mice treated with PBS administered subcutaneously twice a week for 4 weeks. At the end of the treatment, the mice were intraperitoneally administered 20 μg of captopril. Group 2 served as a PBS control group for captopril-induced vascular permeability.

[1116] Group 3 consisted of 8 C57BL/6J-Tyrc-2J mice treated with PBS administered subcutaneously twice a week for 4 weeks. On day 14, the mice were treated with 50 mg/kg of the antisense oligonucleotide targeting C1 inhibitor, ISIS 461756, administered subcutaneously twice a week for 2 weeks. At the end of the treatment period, the mice were intraperitoneally administered 20 μg of captopril. Group 3 served as a PBS control group for captopril and ISIS 461756-induced vascular permeability.

[1117] Group 4 consisted of 8 C57BL/6J-Tyrc-2J mice treated with PBS administered subcutaneously twice a week for 4 weeks. On day 14, the mice were treated with 50 mg/kg of the antisense oligonucleotide targeting C1 inhibitor, ISIS 461756, administered subcutaneously twice a week for 2 weeks. At the end of the treatment period, the mice were intraperitoneally administered 20 μg of captopril. The mice were then also intraperitoneally administered 30 μg of HOE-140. Group 4 served as a positive control for inhibition of vascular permeability with HOE-140.

[1118] Group 5 consisted of 8 C57BL/6J-Tyrc-2J mice treated with 40 mg/kg of control oligonucleotide ISIS 141923, a 5-10-5 MOE gapmer with no known murine target, (CCTTCCCTGAAGGTTCCTCC; SEQ ID NO: 2246) administered subcutaneously twice a week for 4 weeks. On day 14, the mice were treated with 50 mg/kg of the antisense oligonucleotide targeting C1 inhibitor, ISIS 461756, administered subcutaneously twice a week for 2 weeks. At the end of the treatment period, the mice were intraperitoneally administered g of captopril. Group 5 served as a control group for captopril and ISIS 461756-induced vascular permeability.

[1119] Group 6 consisted of 8 C57BL/6J-Tyrc-2J mice and was treated with 40 mg/kg of ISIS 482584 administered subcutaneously twice a week for 4 weeks. At the end of the treatment period, the mice were intraperitoneally administered 20 μg of captopril. Group 6 served as the experimental treatment group for examining the effect of PKK ASO on captopril-induced vascular permeability.

[1120] Group 7 consisted of 8 C57BL/6J-Tyrc-2J mice treated with 40 mg/kg of ISIS 482584 administered subcutaneously twice a week for 4 weeks. On day 14, the mice were treated with 50 mg/kg of the antisense oligonucleotide targeting C1 inhibitor, ISIS 461756, administered subcutaneously twice a week for 2 weeks. At the end of the treatment period, the mice were intraperitoneally administered 20 μg of captopril. Group 7 served as the experimental treatment group for examining the effect of PKK ASO on captopril and ISIS 461756-induced vascular permeability.

[1121] All the groups were then injected with 30 mg/kg of Evans Blue solution into the tail vein. The mice were sacrificed 30 min after the Evans Blue solution administration and colons, feet, ears, and intestines were harvested. Blood samples were taken through cardiac puncture.

TABLE 182
Treatment groups

| Group | | | | |
|---|---|---|---|---|
| No. | Treatment | Captopril | ISIS 461756 | HOE-140 |
| 1. (N = 4) | PBS | No | No | No |
| 2. (N = 8) | PBS | Yes | No | No |
| 3. (N = 8) | PBS | Yes | Yes | No |
| 4. (N = 8) | PBS | Yes | Yes | Yes |
| 5. (N = 8) | ISIS 141923 | Yes | Yes | No |
| 6. (N = 8) | ISIS 482584 | Yes | No | No |
| 7. (N = 8) | ISIS 482584 | Yes | Yes | No |

### Quantification of Vascular Permeability

[1122] The harvested tissues from the feet, colon, ears, and intestines were placed separately in formamide solution overnight to leach out the Evans Blue dye. The formamide solution containing ear and feet tissue was heated to 55° C. and left overnight. The color intensity of the dye-infused formamide solution was then measured at OD₆₀₀ₙₘ, and is presented in Table 183. Mice displaying any manifestation of angioedema take up more dye and, therefore, demonstrate high OD values.

[1123] As presented in Table 183, treatment with ISIS 482584 prevents vascular permeability in mice treated with captopril (Group 6) and in mice treated with captopril and ISIS 461756 (Group 7) compared to the respective PBS control groups (Groups 2 and 3). Measures of vascular permeability in mice of Groups 6 and 7 were also reduced in most of the tissues in comparison to the mice treated with the control oligonucleotide, ISIS 141923 (Group 5), where vascular permeability was induced with captopril and ISIS 461756. Measures of vascular permeability in the colon and feet tissues of both the treatment groups (Groups 6 and 7) were comparable to basal levels, as observed in mice treated with only PBS (Group 1). Reduction in vascular permeability in mice treated with ISIS 482584 was comparable to that seen in mice treated with the bradykinin 2 receptor antagonist, HOE140, which served as a positive control in this assay.

[1124] Therefore, antisense inhibition of PKK mRNA may be beneficial for the treatment and prevention of vascular permeability, which is symptomatic of HAE.

TABLE 183
OD_{600 nm} of Evans Blue dye to measure vascular permeability

| Group | Treat- | Capto- | ISIS | HOE- | Co- | Intes- | | |
|---|---|---|---|---|---|---|---|---|
| No. | ment | pril | 461756 | 140 | lons | tines | Feet | Ears |
| 1 | PBS | No | No | No | 0.26 | 0.16 | 0.11 | 0.02 |
| 2 | PBS | Yes | No | No | 0.49 | 0.29 | 0.12 | 0.07 |
| 3 | PBS | Yes | Yes | No | 0.49 | 0.34 | 0.11 | 0.12 |
| 4 | PBS | Yes | Yes | Yes | 0.14 | 0.18 | 0.07 | 0.09 |
| 5 | ISIS | Yes | Yes | No | 0.44 | 0.29 | 0.14 | 0.08 |
| | 141923 | | | | | | | |
| 6 | ISIS | Yes | No | No | 0.27 | 0.30 | 0.07 | 0.14 |
| | 482584 | | | | | | | |
| 7 | ISIS | Yes | Yes | No | 0.21 | 0.34 | 0.07 | 0.06 |
| | 482584 | | | | | | | |

### Quantification of High Molecular Weight Kininogen (HMWK)

[1125] Western blot quantification of HMWK from blood samples shows that Groups 1 and 2 have low levels of HMWK as compared to Groups 6 and 7 indicating that vascular permeability is reversed in Groups 6 and 7. Samples from Groups 1 and 2 have increased HMWK cleavage product as compared to Groups 6 and 7. Thus, lack of HMWK is caused by PKK cleavage of HMWK into cleavage products (including bradykinin and HKa).

### Example 125: In Vivo Effect of Antisense Inhibition of Murine PKK on Basal Permeability and Captopril-Induced Permeability in Mice

[1126] Basal permeability is the level of vascular permeability occurring in the tissues of naïve, untreated mice. The effect of ISIS 482584 in the prevention of vascular permeability, either basal or captopril-induced, was evaluated.

### Treatment

[1127] The various treatment groups for this assay are presented in Table 184.

[1128] Group 1 consisted of 8 mice and was treated with PBS administered subcutaneously twice a week for 4 weeks. No other treatment was administered to Group 1 which served as a control group to measure the basal levels of vascular permeability.

[1129] Group 2 consisted of 8 mice and was treated with PBS administered subcutaneously twice a week for 4 weeks. At the end of the treatment period, the mice were intraperitoneally administered 20 μg of captopril.

[1130] Group 2 served as the negative control group for captopril-induced vascular permeability.

[1131] Group 3 consisted of 8 mice and was treated with PBS administered subcutaneously twice a week for 4 weeks. At the end of the treatment period, the mice were intraperitoneally administered 30 μg of HOE-140.

[1132] Group 3 served as a positive control for inhibition of basal vascular permeability.

[1133] Group 4 consisted of 8 mice and was treated with PBS administered subcutaneously twice a week for 4 weeks. At the end of the treatment period, the mice were intraperitoneally administered 20 μg of captopril. The mice were also intraperitoneally administered 30 μg of HOE-140. Group 4 served as a positive control for inhibition of captopril-induced vascular permeability.

[1134] Group 5 consisted of 8 mice and was treated with 40 mg/kg of ISIS 482584 administered subcutaneously twice a week for 4 weeks. Group 5 served as an experimental treatment group for examining the effect of ISIS 482584 on basal vascular permeability.

[1135] Group 6 consisted of 8 mice and was treated with 40 mg/kg of ISIS 482584 administered subcutaneously twice a week for 4 weeks. At the end of the treatment period, the mice were intraperitoneally administered 20 μg of captopril. Group 6 served as an experimental treatment group for examining the effect of ISIS 482584 on captopril-induced vascular permeability.

[1136] All the groups were then injected with 30 mg/kg of Evans Blue solution. The mice were sacrificed 30 min after the Evans Blue solution administration and colons, feet, ears, and intestines were harvested.

TABLE 184
Treatment groups

| Group | | | |
|---|---|---|---|
| No. | Treatment | Captopril | HOE-140 |
| 1. (N = 8) | PBS | No | No |
| 2. (N = 8) | PBS | Yes | No |
| 3. (N = 8) | PBS | No | Yes |
| 4. (N = 8) | PBS | Yes | Yes |
| 5. (N = 8) | ISIS 482584 | No | No |
| 6. (N = 8) | ISIS 482584 | Yes | No |

### Quantification of Vascular Permeability

[1137] The harvested tissues from the feet, colon, intestine, and ears were placed separately in formamide solution overnight to leach out the Evans Blue dye. The formamide solution containing feet and ear tissue was heated to 55° C. and left overnight. The color intensity of the dye-infused formamide solution was then measured at OD₆₀₀ₙₘ, and is presented in Table 185. Mice displaying any manifestation of angioedema take up more dye and, therefore, demonstrate high OD values.

[1138] As presented in Table 185, mice treated with ISIS 482584 demonstrated reduced basal vascular permeability compared to the PBS control (Group 5 vs. Group 1). The reduction in basal vascular permeability by treatment with ISIS 482584 was comparable to that caused by treatment with HOE-140 (Group 3, which served as the positive control). Mice treated with ISIS 482584 also demonstrated reduced captopril-induced vascular permeability in most tissues compared to the PBS control (Group 6 vs. Group 2). The reduction in captopril-induced vascular permeability by treatment with ISIS 482584 was comparable to that caused by treatment with HOE-140 (Group 4, which served as the positive control).

TABLE 185
OD_{600 nm} of Evans Blue dye to measure vascular permeability

| Group | Treat- | Capto- | HOE- | Co- | | Intes- | |
|---|---|---|---|---|---|---|---|
| No. | ment | pril | 140 | lon | Feet | tine | Ears |
| 1 | PBS | No | No | 0.27 | 0.08 | 0.23 | 0.06 |
| 2 | PBS | Yes | No | 0.61 | 0.08 | 0.24 | 0.01 |
| 3 | PBS | No | Yes | 0.18 | 0.06 | 0.21 | 0.03 |
| 4 | PBS | Yes | Yes | 0.29 | 0.03 | 0.14 | 0.00 |
| 5 | ISIS | No | No | 0.19 | 0.07 | 0.22 | 0.04 |
| | 482584 | | | | | | |
| 6 | ISIS | Yes | No | 0.37 | 0.05 | 0.22 | 0.00 |
| | 482584 | | | | | | |

### Example 126: Dose-Dependent Effect of Antisense Inhibition of Murine PKK on Captopril-Induced Vascular Permeability

[1139] The effect of varying doses on ISIS 482584 on captopril-induced vascular permeability was evaluated.

### Treatment

[1140] The various treatment groups for this assay are presented in Table 186.

[1141] Group 1 consisted of 4 mice and was treated with PBS administered subcutaneously twice a week for 3 weeks. No other treatment was administered to Group 1 which served as a control group to measure the basal levels of vascular permeability.

[1142] Group 2 consisted of 8 mice and was treated with PBS administered subcutaneously twice a week for 3 weeks. At the end of the treatment period, the mice were intraperitoneally administered 20 μg of captopril.

[1143] Group 2 served as the control group for captopril-induced vascular permeability.

[1144] Group 3 consisted of 4 mice and was treated with PBS administered subcutaneously twice a week for 3 weeks. At the end of the treatment period, the mice were intraperitoneally administered 20 μg of captopril. The mice were also intraperitoneally administered 30 μg of Icatibant (HOE-140). Group 4 served as a positive control for inhibition of captopril-induced vascular permeability.

[1145] Groups 4, 5, 6, 7, 8, and 9 consisted of 8 mice each and were treated with 2.5 mg/kg, 5 mg/kg, 10 mg/kg, 20 mg/kg, 40 mg/kg, or 80 mg/kg (corresponding to 5 mg/kg, 10 mg/kg, 20 mg/kg, 40 mg/kg, 80 mg/kg, or 160 mg/kg per week), respectively of ISIS 482584 administered subcutaneously twice a week for 3 weeks. At the end of the treatment period, the mice of all the groups were intraperitoneally administered 20 g of captopril. Groups 4-9 served as the experimental treatment groups for examining the effect of varying doses of ISIS 482584 on captopril-induced vascular permeability.

[1146] All the groups were then injected with 30 mg/kg of Evans Blue solution in the tail vein. The mice were sacrificed 30 min after the Evans Blue solution administration and colons, feet, ears, and intestines were harvested. Blood samples were taken through cardiac puncture.

TABLE 186
Treatment groups

| Group | | Dose | | |
|---|---|---|---|---|
| No. | Treatment | (mg/kg/wk) | Captopril | HOE-140 |
| 1. (N = 4) | PBS | — | No | No |
| 2. (N = 8) | PBS | — | Yes | No |
| 3. (N = 4) | PBS | — | Yes | Yes |
| 4. (N = 8) | ISIS 482584 | 160 | Yes | No |
| 5. (N = 8) | ISIS 482584 | 80 | Yes | No |
| 6. (N = 8) | ISIS 482584 | 40 | Yes | No |
| 7. (N = 8) | ISIS 482584 | 20 | Yes | No |
| 8. (N = 8) | ISIS 482584 | 10 | Yes | No |
| 9. (N = 8) | ISIS 482584 | 5 | Yes | No |

### Quantification of Vascular Permeability

[1147] The harvested tissues were placed in formamide solution overnight to leach out the Evans Blue dye. The formamide solution containing feet and ear tissue was heated to 55° C. and left overnight. The color intensity of the dye-infused formamide solution was then measured at OD₆₀₀ₙₘ, and is presented in Table 187. Mice displaying any manifestation of angioedema take up more dye and, therefore, demonstrate high OD values.

[1148] As presented in Table 187, mice treated with higher doses of ISIS 482584 (Groups 4, 5, and 6) had reduced levels of captopril-induced vascular permeability compared to the corresponding PBS control group (Group 2). The reduction in vascular permeability in mice of these treatment groups (Groups 4 and 5) was comparable to the levels of basal vascular permeability (as shown in Group 1) as well as in mice treated with HOE-140 (Group 3).

TABLE 187
OD_{600 nm} of Evans Blue dye to measure vascular permeability

| Group | Treat- | Dose | Capto- | HOE- | Co- | | Intes- | |
|---|---|---|---|---|---|---|---|---|
| No. | ment | (mg/kg) | pril | 140 | lon | Feet | tine | Ears |
| 1 | PBS | — | No | No | 0.16 | 0.07 | 0.13 | 0.01 |
| 2 | PBS | — | Yes | No | 0.39 | 0.12 | 0.18 | 0.07 |
| 3 | PBS | — | Yes | Yes | 0.15 | 0.03 | 0.10 | 0.04 |
| 4 | ISIS | 160 | Yes | No | 0.26 | 0.10 | 0.15 | 0.05 |
| | 482584 | | | | | | | |
| 5 | ISIS | 80 | Yes | No | 0.21 | 0.04 | 0.17 | 0.03 |
| | 482584 | | | | | | | |
| 6 | ISIS | 40 | Yes | No | 0.36 | 0.10 | 0.20 | 0.05 |
| | 482584 | | | | | | | |
| 7 | ISIS | 20 | Yes | No | 0.40 | 0.11 | 0.20 | 0.07 |
| | 482584 | | | | | | | |
| 8 | ISIS | 10 | Yes | No | 0.41 | 0.10 | 0.19 | 0.05 |
| | 482584 | | | | | | | |
| 9 | ISIS | 5 | Yes | No | 0.41 | 0.10 | 0.17 | 0.05 |
| | 482584 | | | | | | | |

### Quantification of Vascular Leakage

[1149] The blood drawn through cardiac puncture was immediately mixed with 3 times the volume of ice-cold ethanol. The solution was centrifuged at 15,000 g for 20 minutes at 4° C. to remove cell debris and precipitated plasma proteins. The ethanol extracts were further purified by ultra-filtration through a 10 kDa MWCO filter. The color intensity of the ethanol extracted plasma solution was then measured at OD₆₂₀ₙₘ. The results are presented in Table 188 as percentage increase or decrease of the OD values of the Group 1 PBS control. It was expected that tissues from mice displaying manifestation of angioedema would leak more dye from the plasma and, therefore, demonstrate low OD values, whereas treatment groups may display higher OD values due to reduced vascular leakage. Mice treated with 160 mg/kg/week and 80 mg/kg/week of ISIS 482584 (Groups 4 and 5) demonstrated less vascular leakage compared to the PBS negative control treated with captopril (Group 2). The results from Groups 4 and 5 were comparable to the positive control treated with HOE-140 (Group 3).

TABLE 188
Percentage of OD₆₂₀ₙₘ of Evans Blue dye compared to the PBS basal
control to measure vascular leakage

| Group | | Dose | | HOE- | |
|---|---|---|---|---|---|
| No. | Treatment | (mg/kg) | Captopril | 140 | Plasma |
| 2 | PBS | — | Yes | No | −43 |
| 3 | PBS | — | Yes | Yes | 5 |
| 4 | ISIS 482584 | 160 | Yes | No | 91 |
| 5 | ISIS 482584 | 80 | Yes | No | 40 |
| 6 | ISIS 482584 | 40 | Yes | No | −31 |
| 7 | ISIS 482584 | 20 | Yes | No | −26 |
| 8 | ISIS 482584 | 10 | Yes | No | −20 |
| 9 | ISIS 482584 | 5 | Yes | No | −23 |

### Example 127: Dose-Dependent Effect of Antisense Inhibition of Murine PKK on Basal Permeability in Mice

[1150] The effect of varying doses on ISIS 482584 on basal vascular permeability was evaluated.

### Treatment

[1151] The various treatment groups for this assay are presented in Table 189.

[1152] Group 1 consisted of 8 mice and was treated with PBS administered subcutaneously twice a week for 3 weeks. No other treatment was administered to Group 1 which served as a control group to measure the basal levels of vascular permeability.

[1153] Group 2 consisted of 4 mice and was treated with PBS administered subcutaneously twice a week for 3 weeks. At the end of the treatment period, the mice were intraperitoneally administered 30 μg of HOE-140.

[1154] Group 2 served as a positive control for inhibition of basal vascular permeability.

[1155] Groups 3, 4, 5, 6, 7, and 8 consisted of 8 mice each and were treated with 2.5 mg/kg, 5 mg/kg, 10 mg/kg, 20 mg/kg, 40 mg/kg, or 80 mg/kg (corresponding to 5 mg/kg, 10 mg/kg, 20 mg/kg, 40 mg/kg, 80 mg/kg, or 160 mg/kg per week), respectively of ISIS 482584 administered subcutaneously twice a week for 3 weeks. Groups 4-9 served as the experimental treatment groups for examining the effect of varying doses of ISIS 482584 on basal vascular permeability.

[1156] All the groups were then injected with 30 mg/kg of Evans Blue solution in the tail vein. The mice were sacrificed 30 min after the Evans Blue solution administration and colons, feet, and ears were harvested and examined for permeability defects. Blood samples were taken through cardiac puncture.

TABLE 189
Treatment groups

| Group | | Dose | |
|---|---|---|---|
| No. | Treatment | (mg/kg/week) | HOE-140 |
| 1. (N = 8) | PBS | — | No |
| 2. (N = 4) | PBS | — | Yes |
| 3. (N = 8) | ISIS 482584 | 160 | No |
| 4. (N = 8) | ISIS 482584 | 80 | No |
| 5. (N = 8) | ISIS 482584 | 40 | No |
| 6. (N = 8) | ISIS 482584 | 20 | No |
| 7. (N = 8) | ISIS 482584 | 10 | No |
| 8. (N = 8) | ISIS 482584 | 5 | No |

### Quantification of Vascular Permeability

[1157] The harvested tissues from the feet, colon, and ears were placed in formamide solution overnight to leach out the Evans Blue dye. The formamide solution containing feet and ear tissue was heated to 55° C. and left overnight. The color intensity of the dye-infused formamide solution was then measured at OD₆₀₀ₙₘ, and is presented in Table 190. Higher OD values are associated with higher levels of permeability.

[1158] As presented in Table 190, most of the tissues of mice treated with ISIS 482584 at all doses (Groups 3-8) demonstrated reduced basal vascular permeability compared to the PBS control (Group 1). The reduction in basal vascular permeability of the ISIS oligonucleotide-treated groups was comparable to the same demonstrated in the positive control group treated with HOE-140 (Group 2).

TABLE 190
OD_{600 nm} of Evans Blue dye to measure vascular permeability

| Group | Treat- | Dose | HOE- | Co- | | |
|---|---|---|---|---|---|---|
| No. | ment | (mg/kg/week) | 140 | lon | Feet | Ears |
| 1 | PBS | — | No | 0.27 | 0.17 | 0.013 |
| 2 | PBS | — | Yes | 0.24 | 0.09 | 0.047 |
| 3 | ISIS | 160 | No | 0.25 | 0.11 | 0.019 |
| | 482584 | | | | | |
| 4 | ISIS | 80 | No | 0.24 | 0.09 | 0.014 |
| | 482584 | | | | | |
| 5 | ISIS | 40 | No | 0.27 | 0.11 | 0.011 |
| | 482584 | | | | | |
| 6 | ISIS | 20 | No | 0.26 | 0.11 | 0.009 |
| | 482584 | | | | | |
| 7 | ISIS | 10 | No | 0.31 | 0.10 | 0.015 |
| | 482584 | | | | | |
| 8 | ISIS | 5 | No | 0.32 | 0.11 | 0.009 |
| | 482584 | | | | | |

### Quantification of Vascular Leakage

[1159] The blood drawn through cardiac puncture was immediately mixed with 3 times the volume of ice-cold ethanol. The solution was centrifuged at 15,000 g for 20 minutes at 4° C. to remove cell debris and precipitated plasma proteins. The ethanol extracts were further purified by ultra-filtration through a 10 kDa MWCO filter. The color intensity of the ethanol extracted plasma solution was then measured at OD₆₂₀ₙₘ. The results are presented in Table 191 as percentage increase or decrease of the OD values of the Group 1 PBS control. It was expected that treatment groups may display higher OD values due to reduced vascular leakage. All the mice in the ISIS oligonucleotide-treated groups demonstrated significantly reduced vascular leakage compared to the PBS negative control.

TABLE 191
Percentage of OD₆₂₀ₙₘ of Evans Blue dye compared to the PBS basal
control to measure vascular leakage

| Group | | Dose | | |
|---|---|---|---|---|
| No. | Treatment | (mg/kg/week) | HOE-140 | Plasma |
| 2. (N = 8) | ISIS 482584 | 160 | No | 95 |
| 3. (N = 8) | ISIS 482584 | 80 | No | 93 |
| 4. (N = 8) | ISIS 482584 | 40 | No | 83 |
| 5. (N = 8) | ISIS 482584 | 20 | No | 56 |
| 6. (N = 8) | ISIS 482584 | 10 | No | 36 |

### Quantification of High Molecular Weight Kininogen (HMWK)

[1160] Western blot quantification of HMWK from blood samples are presented in Tables 192 and 193.

[1161] As shown in Table 192, Groups treated with 482584 have higher levels of HMWK as compared to PBS control, increasing in a dose-dependent manner. Treatment with PKK antisense oligonucleotide results in stabilization of HMWK. Thus, vascular permeability is reduced in ISIS 482584-treated groups in a dose-dependent manner. As shown in Table 193, Groups treated with ISIS 482584 have lower HMWK cleavage product as compared to PBS control, decreasing in a dose-dependent manner. Thus, reduced HMWK is caused by PKK cleavage of HMWK into cleavage products (including bradykinin and HKa). Data are presented in Intensity Units as measured by densitometer.

TABLE 192
Quantification of HMWK by densitometer

| Group No | Treatment | Dose (mg/kg/week) | Intensity Units |
|---|---|---|---|
| 1 | PBS | — | 89 |
| 3 | ISIS 482584 | 160 | 21358 |
| 4 | ISIS 482584 | 80 | 7279 |
| 5 | ISIS 482584 | 40 | 873 |
| 6 | ISIS 482584 | 20 | 608 |
| 7 | ISIS 482584 | 10 | 507 |

TABLE 193
Quantification of HMWK cleavage product by densitometer

| Group No | Treatment | Dose (mg/kg/week) | Intensity Units |
|---|---|---|---|
| 1 | PBS | — | 401738 |
| 3 | ISIS 482584 | 160 | 19936 |
| 4 | ISIS 482584 | 80 | 204482 |
| 5 | ISIS 482584 | 40 | 388135 |
| 6 | ISIS 482584 | 20 | 403360 |
| 7 | ISIS 482584 | 10 | 414774 |

### Example 128: Combination Therapy of Antisense Oligonucleotides Targeting PKK and Factor 12 on Captopril-Induced Vascular Permeability in Mice

[1162] Mice were treated varying doses of ISIS 410944, a 5-10-5 MOE gapmer targeting Factor 12 (GCATGGGACAGAGATGGTGC; SEQ ID NO: 2247), and ISIS 482584 in a captopril-induced vascular permeability model.

### Treatment

[1163] The various treatment groups for this assay are presented in Table 194.

[1164] Group 1 consisted of 4 mice and was treated with PBS administered subcutaneously twice a week for 3 weeks. No other treatment was administered to Group 1 which served as a control group to measure the basal levels of vascular permeability.

[1165] Group 2 consisted of 8 mice and was treated with PBS administered subcutaneously twice a week for 3 weeks. At the end of the treatment period, the mice were intraperitoneally administered 20 μg of captopril.

[1166] Group 2 served as the control group for captopril-induced vascular permeability.

[1167] Group 3 consisted of 4 mice and was treated with PBS administered subcutaneously twice a week for 3 weeks. At the end of the treatment period, the mice were intraperitoneally administered 20 μg of captopril. The mice were also intraperitoneally administered 30 μg of HOE-140. Group 3 served as a positive control for inhibition of captopril-induced vascular permeability.

[1168] Groups 4, 5, 6, 7, and 8 consisted of 8 mice each and were treated with 2.5 mg/kg, 5 mg/kg, 10 mg/kg, 20 mg/kg, or 40 mg/kg (corresponding to 5 mg/kg, 10 mg/kg, 20 mg/kg, 40 mg/kg, or 80 mg/kg per week), respectively of ISIS 482584 and ISIS 410944 each administered subcutaneously twice a week for 3 weeks. At the end of the treatment period, the mice of all the groups were intraperitoneally administered 20 g of captopril. Groups 4-8 served as the experimental treatment groups for examining the effect of ISIS 410944 and ISIS 482584 on captopril-induced vascular permeability.

[1169] All the groups were then injected with 30 mg/kg of Evans Blue solution in the tail vein. The mice were sacrificed 30 min after the Evans Blue solution administration and colons, feet, ears, and intestines were harvested.

TABLE 194
Treatment groups

| | | Dose | | |
|---|---|---|---|---|
| Group | | (mg/kg/wk) | | |
| No. | Treatment | of each ASO | Captopril | HOE-140 |
| 1. (N = 4) | PBS | — | No | No |
| 2. (N = 8) | PBS | — | Yes | No |
| 3. (N = 4) | PBS | — | Yes | Yes |
| 4. (N = 8) | ISIS | 80 | Yes | No |
| | 482584 + ISIS | | | |
| | 410944 | | | |
| 5. (N = 8) | ISIS | 40 | Yes | No |
| | 482584 + ISIS | | | |
| | 410944 | | | |
| 6. (N = 8) | ISIS | 20 | Yes | No |
| | 482584 + ISIS | | | |
| | 410944 | | | |
| 7. (N = 8) | ISIS | 10 | Yes | No |
| | 482584 + ISIS | | | |
| | 410944 | | | |
| 8. (N = 8) | ISIS | 5 | Yes | No |
| | 482584 + ISIS | | | |
| | 410944 | | | |

### Quantification of Vascular Permeability

[1170] The harvested tissues from the feet, colon, and ears were placed in formamide solution overnight to leach out the Evans Blue dye. The foramide solution containing feet and car tissue was heated to 55° C. and left overnight. The color intensity of the dye-infused formamide solution was then measured at OD₆₀₀ₙₘ, and is presented in Table 195. Higher OD values are associated with higher levels of permeability.

[1171] As presented in Table 195, most of the tissues of mice treated with a combination of ISIS 482584 and ISIS 410944 at all doses (Groups 3-8) demonstrated reduced vascular permeability compared to the PBS control (Group 1). The reduction in vascular permeability of the ISIS oligonucleotide-treated groups was comparable to the same demonstrated in the basal PBS control (Group 1), as well as the positive control group treated with HOE140 (Group 2). Combination of PKK and Factor 12 antisense oligonucleotides results in synergistic decrease in permeability. As expected, a corresponding synergistic decrease in vascular leakage was also observed.

TABLE 195
OD_{600 nm} of Evans Blue dye to measure vascular permeability

| | | Dose | | | | | | |
|---|---|---|---|---|---|---|---|---|
| Group | Treat- | (mg/kg/wk) | Capto- | HOE- | Co- | | Intes- | |
| No. | ment | of each ASO | pril | 140 | lon | Feet | tines | Ears |
| 1 | PBS | — | No | No | 0.24 | 0.11 | 0.13 | 0.01 |
| 2 | PBS | — | Yes | No | 0.38 | 0.15 | 0.11 | 0.05 |
| 3 | PBS | — | Yes | Yes | 0.23 | 0.06 | 0.15 | 0.04 |
| 4 | ISIS | 80 | Yes | No | 0.19 | 0.07 | 0.11 | 0.04 |
| | 482584 + | | | | | | | |
| | ISIS | | | | | | | |
| | 410944 | | | | | | | |
| 5 | ISIS | 40 | Yes | No | 0.19 | 0.07 | 0.12 | 0.03 |
| | 482584 + | | | | | | | |
| | ISIS | | | | | | | |
| | 410944 | | | | | | | |
| 6 | ISIS | 20 | Yes | No | 0.22 | 0.08 | 0.12 | 0.04 |
| | 482584 + | | | | | | | |
| | ISIS | | | | | | | |
| | 410944 | | | | | | | |
| 7 | ISIS | 10 | Yes | No | 0.38 | 0.13 | 0.13 | 0.05 |
| | 482584 + | | | | | | | |
| | ISIS | | | | | | | |
| | 410944 | | | | | | | |
| 8 | ISIS | 5 | Yes | No | 0.53 | 0.12 | 0.13 | 0.03 |
| | 482584 + | | | | | | | |
| | ISIS | | | | | | | |
| | 410944 | | | | | | | |

### Example 129: Combination Therapy of Antisense Oligonucleotides Targeting PKK and Factor 12 on Basal Vascular Permeability in Mice

[1172] Mice were treated with varying doses of ISIS 410944, an antisense oligonucleotide targeting Factor 12, and ISIS 482584 in a basal vascular permeability model.

### Treatment

[1173] The various treatment groups for this assay are presented in Table 196.

[1174] Group 1 consisted of 8 mice and was treated with PBS administered subcutaneously twice a week for 3 weeks. No other treatment was administered to Group 1 which served as a control group to measure the basal levels of vascular permeability.

[1175] Group 2 consisted of 4 mice and was treated with PBS administered subcutaneously twice a week for 3 weeks. At the end of the treatment period, the mice were intraperitoneally administered 30 μg of HOE-140.

[1176] Group 2 served as a positive control for inhibition of basal vascular permeability.

[1177] Groups 3, 4, 5, 6, and 7 consisted of 8 mice each and were treated with 2.5 mg/kg, 5 mg/kg, 10 mg/kg, 20 mg/kg, or 40 mg/kg (corresponding to 5 mg/kg, 10 mg/kg, 20 mg/kg, 40 mg/kg, or 80 mg/kg per week), respectively of ISIS 482584 and ISIS 410944 each administered subcutaneously twice a week for 3 weeks. Groups 3-7 served as the experimental treatment groups for examining the effect of ISIS 410944 and ISIS 482584 on basal vascular permeability.

[1178] All the groups were then injected with 30 mg/kg of Evans Blue solution in the tail vein. The mice were sacrificed 30 min after the Evans Blue solution administration and colons, feet, ears, and intestines were harvested.

TABLE 196
Treatment groups

| | | Dose | |
|---|---|---|---|
| Group No. | Treatment | (mg/kg/wk) | HOE-140 |
| 1. (N = 8) | PBS | — | No |
| 2. (N = 4) | PBS | — | Yes |
| 3. (N = 8) | ISIS 482584 + ISIS | 80 | No |
| | 410944 | | |
| 4. (N = 8) | ISIS 482584 + ISIS | 40 | No |
| | 410944 | | |
| 5. (N = 8) | ISIS 482584 + ISIS | 20 | No |
| | 410944 | | |
| 6. (N = 8) | ISIS 482584 + ISIS | 10 | No |
| | 410944 | | |
| 7. (N = 8) | ISIS 482584 + ISIS | 5 | No |
| | 410944 | | |

### Quantification of Vascular Permeability

[1179] The harvested tissues from the feet, colon, intestines, and ears were placed in formamide solution overnight to leach out the Evans Blue dye. The formamide solution containing feet and ear tissue was heated to 55° C. and left overnight. The color intensity of the dye-infused formamide solution was then measured at OD₆₀₀ₙₘ, and is presented in Table 197. Higher OD values are associated with higher levels of permeability.

[1180] As presented in Table 197, most of the tissues of mice treated with a combination of ISIS 482584 and ISIS 410944 at all doses (Groups 2-7) demonstrated reduced vascular permeability compared to the PBS control (Group 1). The reduction in vascular permeability of the ISIS oligonucleotide-treated groups was comparable to the same demonstrated in positive control group treated with HOE140 (Group 2). Combination of PKK and Factor 12 antisense oligonucleotides results in synergistic decrease in permeability. As expected, a corresponding synergistic decrease in vascular leakage was also observed.

TABLE 197
OD_{600 nm} of Evans Blue dye to measure vascular permeability

| Group | Treat- | Dose | HOE- | Co- | | Intes- | |
|---|---|---|---|---|---|---|---|
| No. | ment | (mg/kg/wk) | 140 | lon | Feet | tines | Ears |
| 1 | PBS | — | No | 0.19 | 0.08 | 0.10 | 0.004 |
| 2 | PBS | — | Yes | 0.14 | 0.04 | 0.08 | 0.008 |
| 3 | ISIS | 80 | No | 0.14 | 0.04 | 0.09 | 0.01 |
| | 482584 + | | | | | | |
| | ISIS | | | | | | |
| | 410944 | | | | | | |
| 4 | ISIS | 40 | No | 0.15 | 0.05 | 0.10 | 0.006 |
| | 482584 + | | | | | | |
| | ISIS | | | | | | |
| | 410944 | | | | | | |
| 5 | ISIS | 20 | No | 0.15 | 0.04 | 0.10 | 0.007 |
| | 482584 + | | | | | | |
| | ISIS | | | | | | |
| | 410944 | | | | | | |
| 6 | ISIS | 10 | No | 0.15 | 0.06 | 0.10 | 0.004 |
| | 482584 + | | | | | | |
| | ISIS | | | | | | |
| | 410944 | | | | | | |
| 7 | ISIS | 5 | No | 0.14 | 0.05 | 0.13 | 0.002 |
| | 482584 + | | | | | | |
| | ISIS | | | | | | |
| | 410944 | | | | | | |

### Example 130: Inhibition of Factor 12 Protein Activation by ISIS 482584

[1181] The effect of antisense inhibition of PKK mRNA on Factor 12 protein activation was evaluated.

### Treatment

[1182] The various treatment groups for this assay are presented in Table 198.

[1183] Group 1 consisted of 8 mice and was treated with PBS administered subcutaneously twice a week for 3 weeks. No other treatment was administered to Group 1 which served as a control group to measure Factor 12 activation.

[1184] Groups 2, 3, 4, 5, and 6 consisted of 8 mice each and were treated with 2.5 mg/kg, 5 mg/kg, 10 mg/kg, 20 mg/kg, or 40 mg/kg (corresponding to 5 mg/kg, 10 mg/kg, 20 mg/kg, 40 mg/kg, or 80 mg/kg per week), respectively of ISIS 482584 administered subcutaneously twice a week for 3 weeks. Groups 2-6 served as the treatment groups for measuring the effect of ISIS 482584 on Factor 12 activation.

[1185] At the end of the treatment period, plasma was harvested from the mice for the Spectrozyme® Factor 12a based amidolytic assay for Factor 12 in plasma.

TABLE 198
Treatment groups

| Group | | Dose |
|---|---|---|
| No. | Treatment | (mg/kg/wk) |
| 1. (N = 8) | PBS | — |
| 2. (N = 8) | ISIS 482584 | 80 |
| 3. (N = 8) | ISIS 482584 | 40 |
| 4. (N = 8) | ISIS 482584 | 20 |
| 5. (N = 8) | ISIS 482584 | 10 |
| 6. (N = 8) | ISIS 482584 | 5 |

### Assay for Factor 12 Activation in Plasma

[1186] Plasma (5 μL) was added to 85 μL of PBS with 1 ug/ml dextran sulfate (500 kDa) in a 96 well polypropelene microplate and the solution was incubated for 5 minutes at room temperature. Spectrozyme® FXIIa (10 μL of a 2 mM solution) and 0.2 mM KALLISTOP™ solution was added and the absorbance kinetic was measured at 405 nm. Factor 12 activation was measured in the linear phase of absorbance accumulation. The results are presented in Table 199 as a percentage of Factor 12 activation measured in the PBS control sample. As observed in Table 199, inhibition of PKK by ISIS 482584 results in decreased activation of Factor 12 by its substrate, implying the that PKK is required for proper factor 12 activation.

TABLE 199
Percentage Factor 12 activation
compared to the PBS control

| Dose | % F12 |
|---|---|
| (mg/kg/wk) | activation |
| 80 | 14 |
| 40 | 24 |
| 20 | 47 |
| 10 | 63 |
| 5 | 82 |

### Example 131: In Vivo Effect of Antisense Inhibition of Murine PKK on C1-INH Antisense Oligonucleotide-Induced Vascular Permeability

[1187] Vascular permeability induced by ISIS 461756, an antisense oligonucleotide which targets murine C1 inhibitor mRNA, increases vascular permeability in mice and replicates the pathology of hereditary angioedema. The effect of ISIS 482584 on this model was evaluated.

### Treatment

[1188] One group of 8 mice was treated with 40 mg/kg ISIS 482584 administered subcutaneously twice a week for 3 weeks (weekly dose of 80 mg/kg). A second group of 8 mice was treated with 40 mg/kg of the control oligonucleotide, ISIS 141923, administered subcutaneously twice a week for 3 weeks (weekly dose of 80 mg/kg). A third group of 8 mice was treated with PBS administered subcutaneously twice a week for 3 weeks. On day 14, all the groups were treated with 12.5 mg/kg ISIS 461756 administered subcutaneously twice a week for 3 weeks (weekly dose of 25 mg/kg). A control group of mice was treated with PBS administered subcutaneously twice a week for 3 weeks but was not administered ISIS 461756. At the end of the treatment period, all the groups were injected with 30 mg/kg of Evans Blue solution into the tail vein. The mice were sacrificed 30 min after the Evans Blue solution administration and colons, feet, ears, and intestines were harvested. The liver was also harvested for RNA analysis.

### RNA Analysis

[1189] RNA was isolated from the liver for RT-PCR analysis of C1-INH and PKK mRNAs. The primer probe set for C1-INH is RTS3218 (forward sequence GAGTCCCCCAGAGCCTACAGT, designated herein as SEQ ID NO: 2234; reverse sequence TGTCATTTGTTATTGTGATGGCTACA, designated herein as SEQ ID NO: 2235; probe sequence CTGCCCTCTACCTGGCCAACAACCA, designated herein as SEQ ID NO: 2236). The primer probe set for PKK is RTS3287 (forward sequence ACAAGTGCATTTTACAGACCAGAGTAC, designated herein as SEQ ID NO: 2237; reverse sequence GGTTGTCCGCTGACTTTATGCT, designated herein as SEQ ID NO: 2238; probe sequence AAGCACAGTGCAAGCGGAACACCC, designated herein as SEQ ID NO: 2239). The results are presented in Table 200 as percent inhibition compared to the PBS control not treated with ISIS 461756. The data indicates that ISIS 461756 significantly reduced C1-INH mRNA expression and that treatment with ISIS 482584 significantly reduced PKK expression.

TABLE 200
Percent inhibition of mRNA expression in mice treated with
ISIS 461756 compared to the untreated PBS control

| | C1-INH | PKK |
|---|---|---|
| Treatment | mRNA | mRNA |
| PBS | 76 | 0 |
| ISIS 141923 | 79 | 0 |
| ISIS 482584 | 77 | 78 |

### Quantification of Vascular Permeability

[1190] The harvested tissues from the feet, colon, and intestines were placed in formamide solution overnight to leach out the Evans Blue dye. The formamide solution containing feet tissue was heated to 55° C. and left overnight. The color intensity of the dye-infused formamide solution was then measured at OD₆₀₀ₙₘ. The data is presented in Table 201 as percent increase or reduction compared to the PBS control not treated with ISIS 461756. The data indicates that treatment with ISIS 482584 prevented vascular permeability induced by ISIS 461756.

TABLE 201
Percent change in vascular permeability in mice treated with
ISIS 461756 compared to the untreated PBS control

| Treatment | Colon | Feet | Intestines |
|---|---|---|---|
| PBS | 13 | 70 | 27 |
| ISIS 141923 | 2 | 80 | 14 |
| ISIS 482584 | −23 | 2 | −25 |

### Example 132: In Vivo Effect of Antisense Inhibition of Murine PKK in the FeCl₃-Induced Inferior Vena Cava Thrombosis Model

[1191] ISIS 482584, which demonstrated significant in vitro and in vivo inhibition of PKK, was evaluated in the FeCl₃-induced inferior vena cava thrombosis mouse model.

### Treatment

[1192] Three groups of 8 male BALB/c mice were treated with 10 mg/kg, 20 mg/kg, or 40 mg/kg of ISIS 482584, administered subcutaneously twice a week for 3 weeks (weekly doses of 20 mg/kg, 40 mg/kg, or 80 mg/kg). Two control groups of 12 BALB/c mice each were treated with PBS, administered subcutaneously twice a week for 3 weeks. Two days after the last dose of antisense oligonucleotide or PBS, mice from all groups were anesthetized with 150 mg/kg ketamine mixed with 10 mg/kg xylazine, administered by intraperitoneal injection. Thrombus formation was induced with FeCl₃ in all groups of anesthetized mice except the first control group.

[1193] In mice undergoing FeCl₃ treatment, thrombus formation was induced by applying a piece of filter paper (2×4 mm) pre-saturated with 10% FeCl₃ solution directly on the vena cava. After 3 minutes of exposure, the filter paper was removed. Thirty minutes after the filter paper application, a fixed length of the vein containing the thrombus was dissected out for platelet analysis. Liver was collected for RNA analysis.

### Quantification of Platelet Composition

[1194] Real-time PCR quantification of platelet factor-4 (PF-4) was used to quantify platelets in the vena cava as a measure of thrombus formation. PF-4 mRNA levels were measured using the murine primer probe set mPF4_LTS_00086 (forward sequence AGACCCATTTCCTCAAGGTAGAACT, designated herein as SEQ ID NO: 2240; reverse sequence CGCAGCGACGCTCATG, designated herein as SEQ ID NO: 2241; probe sequence TCTTTGGGTCCAGTGGCACCCTCTT, designated herein as SEQ ID NO: 2242). Results are presented as a percentage of PF-4 in ISIS oligonucleotide-treated mice, as compared to the two PBS-treated control groups. As shown in Table 202, treatment with ISIS 482584 resulted in a significant reduction of PF-4 in comparison to the PBS control. Therefore, reduction of PKK by the compound provided herein is useful for inhibiting thrombus formation.

TABLE 202
Analysis of thrombus formation by real-time PCR quantification
of PF-4 in the FeCl₃ induced venous thrombosis model

| | Dose in | |
|---|---|---|
| | mg/kg/wk | PF-4 |
| PBS − FeCl₃ | — | 0 |
| PBS + FeCl₃ | — | 100 |
| ISIS 482584 | 20 | 62 |
| | 40 | 34 |
| | 80 | 25 |

### Example 133: In Vivo Effect of Antisense Inhibition of Murine PKK in a Tail Bleeding Assay

[1195] Tail-bleeding was measured to observe whether treatment with ISIS 482584 causes excess bleeding or hemorrhage in mice.

### Treatment

[1196] Groups of 10 male BALB/c mice were treated with 10 mg/kg, 20 mg/kg, or 40 mg/kg of ISIS 482584, administered subcutaneously twice a week for 3 weeks (weekly doses of 20 mg/kg, 40 mg/kg, or 80 mg/kg). A control group of 8 BALB/c mice was treated with PBS, administered subcutaneously twice a week for 3 weeks.

### Tail-Bleeding Assay

[1197] Two days after the final treatment of ISIS oligonucleotides or PBS, mice were placed in a tail bleeding chamber. Mice were anesthetized in the chamber with isoflurane. Then, a small piece of tail (approximately 4 mm from the tip) was cut with sterile scissors. The cut tail was immediately placed in a 15 mL Falcon tube filled with approximately 10 mL of 0.9% NaCl buffer solution warmed to 37° C. The blood was collected over the course of 40 minutes. The saline filled tubes were weighed both before and after bleeding. The results are provided in Table 203.

[1198] Treatment with ISIS 482584 did not significantly affect bleeding. These data suggest that the hemorrhagic potential of the compounds provided herein is low. These data taken with the results provided in Example 19 suggest inhibition of PKK with the compounds described herein are useful for providing antithrombotic activity without associated bleeding risk.

TABLE 203
Tail bleeding assay after treatment with ISIS 482584

| | Dose | Bleeding |
|---|---|---|
| | (mg/kg/wk) | (mL) |
| PBS | — | 0.03 |
| ISIS 482584 | 20 | 0.03 |
| | 40 | 0.14 |
| | 80 | 0.07 |

### Example 134: In Vivo Effect of Antisense Inhibition of Murine PKK in the FeCl₃ Induced Mesenteric Thrombosis Model

[1199] ISIS 482584 was evaluated in the FeCl₃ induced mesenteric thrombosis mouse model.

### Treatment

[1200] A group of 6-8 Swiss-Webster mice was treated with 40 mg/kg of ISIS 482584, administered subcutaneously twice a week for 3 weeks (weekly dose of 80 mg/kg). A control group of 6 Swiss-Webster mice was treated with PBS, administered subcutaneously twice a week for 3 weeks. Two days after the last dose of antisense oligonucleotide or PBS, mice from all groups were anesthetized with 75 mg/kg ketamine mixed with 25 mg/kg xylazine, administered by subcutaneous injection.

[1201] Rhodamine 6G dye at a dosage of 5 mg/kg was injected subcutaneously to stain platelets. Alexa-647-labeled anti-fibrinogen antibody at a dosage of 1 mg/kg was injected via tail vein injection to stain fibrin. The abdomen was opened by a middle incision. The visceral mesentery was spread on a glass coverslip and the mesenteric arterioles (70-120 m) were located by observation under a microscope. Thrombus formation was induced by applying of cotton threads (2×0.3 mm) pre-saturated with 6% FeCl₃ solution directly on the target vessel. After three minutes of exposure, the thread was removed and the color intensities of both the dyes were recorded by fluorescent microscopy (Olympus FluoView 1000 confocal laser scanning microscope) with appropriate filters for 70 min.

[1202] The results for platelet aggregation in the control and treatment groups are presented in Table 204, expressed in arbitrary units (a.u.). Platelet aggregation was reduced in mice treated with ISIS 482584 at a dose of 80 mg/kg/week as compared to mice treated with PBS. The results for fibrin formation in the control and treatment groups are presented in Table 205, also expressed in arbitrary units (a.u.). Fibrin formation was reduced in mice treated with ISIS 482584 at a dose of 80 mg/kg/week as compared to mice treated with PBS. Therefore, these results suggest that ISIS 482584 inhibits thrombus formation.

TABLE 204
Analysis of platelet aggregation by real-time measurement of fluorescent
intensity (a.u.) in a FeCl₃ induced mesenteric thrombus model

| Time | | 80 |
|---|---|---|
| (sec) | PBS | mg/kg/wk |
| 752 | 54 | 74 |
| 1018 | 315 | 11 |
| 1284 | 485 | 7 |
| 1550 | 654 | 0 |
| 1815 | 1079 | 0 |
| 2081 | 1164 | 0 |
| 2347 | 1452 | 0 |
| 2613 | 1440 | 38 |
| 2879 | 1689 | 148 |
| 3144 | 1716 | 129 |
| 3410 | 1845 | 169 |
| 3676 | 1865 | 131 |
| 3944 | 2055 | 87 |

TABLE 205
Analysis of fibrin formation by real-time measurement of fluorescent
intensity (a.u.) in a FeCl₃ induced mesenteric thrombus model

| Time | | 80 |
|---|---|---|
| (sec) | PBS | mg/kg/wk |
| 752 | 9 | 54 |
| 1018 | 86 | 7 |
| 1284 | 203 | 1 |
| 1550 | 319 | 10 |
| 1815 | 521 | 16 |
| 2081 | 598 | 15 |
| 2347 | 831 | 61 |
| 2613 | 959 | 88 |
| 2879 | 1157 | 141 |
| 3144 | 1236 | 150 |
| 3410 | 1374 | 173 |
| 3676 | 1629 | 160 |
| 3944 | 1822 | 128 |

### Example 135: In Vivo Effect of Antisense Inhibition of Murine PKK in the Stenosis-Induced Inferior Vena Cava Thrombosis Model

[1203] ISIS 482584 was evaluated in the stenosis-induced inferior vena cava (IVC) thrombosis model. Reduced blood flow and endothelial damage are hallmarks of this model, also known as the St. Tomas model.

### Treatment

[1204] Four groups of 6-8 BALB/c mice were treated with 5 mg/kg, 10 mg/kg, 20 mg/kg, or 40 mg/kg of ISIS 482584, administered subcutaneously twice a week for 3 weeks (weekly doses of 10 mg/kg, 20 mg/kg, 40 mg/kg, or 80 mg/kg). A control group of 8 BALB/c mice was treated with PBS, administered subcutaneously twice a week for 3 weeks. Two days after the last dose of antisense oligonucleotide or PBS was administered, mice from all groups were anesthetized with 2.5% inhalant isoflurane. The IVC of the mice was exposed via a midline abdominal incision below the left renal vein, and was separated from the abdominal aorta by blunt dissection. A 6-0 silk tie (Ethicon, UK) was placed behind the blood vessel just below the left renal vein and a metal 4-0 suture (Ethicon, UK) was placed longitudinally over the IVC to tie the silk tie on top. The metal suture was then removed. Two neurovascular surgical clips (Braun Medical Inc, PA) were placed at two separate positions below the ligation for 20 seconds each, after which they were removed. The abdominal cavity contents were then replaced and the abdomen was closed. After 24 hrs, the IVC was exposed and checked for thrombi formation. All thrombi formed were collected and fixed in 10% formalin for 24 hrs.

[1205] The thrombi were weighed and the results are presented in Table 206, expressed in miligrams. As demonstrated by the results, treatment with increasing doses of ISIS 482584 resulted in corresponding decrease in thrombus weight. The results indicate that antisense inhibition of PKK is useful for inhibiting thrombus formation.

TABLE 206
Thrombi weights in the stenosis-induced IVC
thrombosis model

| | Dose in | Weight |
|---|---|---|
| | mg/kg/wk | (mg) |
| PBS | — | 10 |
| ISIS 482584 | 10 | 8 |
| | 20 | 6 |
| | 40 | 5 |
| | 80 | 3 |

### Example 136: Inhibition of Murine PKK with an Antisense Oligonucleotide Comprising a GalNAc₃ Conjugate Group

[1206] ISIS 482584 and ISIS 722059, shown in the table below, were tested for their effects on murine PKK mRNA in vivo.

TABLE 207
ISIS 722059, comprising a GalNAc₃
conjugate group and its parent, ISIS 482584

| Isis | | | SEQ |
|---|---|---|---|
| No. | Sequence (5′ to 3′) | Chemistry | ID NO. |
| 482584 | GₑₛGₑₛ^{m}CₑₛAₑₛTₑₛA_{ds}T_{ds}T_{ds} | No conjugate | 2244 |
| | G_{ds}G_{ds}T_{ds}T_{ds}T_{ds}T_{ds}T_{ds}Gₑₛ | group and | |
| | GₑₛAₑₛAₑₛTₑ | full PS | |
| 722059 | GalNAc₃-7_{a-o'}GₑₛGₑₛ^{m}Cₑₒ | 5′-GalNAc₃-7 | 2244 |
| | AₑₒTₑₛA_{ds}T_{ds}T_{ds}G_{ds}G_{ds}T_{ds} | and | |
| | T_{ds}T_{ds}T_{ds}T_{ds}GₑₒGₑₒAₑₛAₑₛTₑ | mixed PS/PO | |

Subscripts:
“e” indicates 2′-MOE modified nucleoside;
“d” indicates β-D-2′-deoxyribonucleoside;
“s” indicates phosphorothioate internucleoside linkages (PS);
“o” indicates phosphodiester internucleoside linkages (PO);
and
“o” indicates -O-P(=O)(OH)-.
Superscript “m” indicates 5-methylcytosines.
The structure of “GalNAc₃-7” is shown in Example 48.

Subscripts: “e” indicates 2′-MOE modified nucleoside; “d” indicates β-D-2′-deoxyribonucleoside; “s” indicates phosphorothioate internucleoside linkages (PS); “o” indicates phosphodiester internucleoside linkages (PO); and “o′” indicates —O—P(═O)(OH)—. Superscript “m” indicates 5-methylcytosines. The structure of “GalNAc₃-7” is shown in Example 48.

### Treatment

[1207] Four groups of four C57Bl/6J-Tyr^{c-2J} mice each were treated with 5.0 mg/kg, 10.0 mg/kg, 20.0 mg/kg, or 40.0 mg/kg of ISIS 482584, administered subcutaneously twice a week for 3 weeks (weekly doses of 10.0 mg/kg, 20.0 mg/kg, 40.0 mg/kg, or 80.0 mg/kg). Four groups of four BALB/c mice each were treated with 1.0 mg/kg, 2.0 mg/kg, 4.0 mg/kg, or 8.0 mg/kg of ISIS 722059, administered subcutaneously twice a week for 3 weeks (weekly doses of 2.0 mg/kg, 4.0 mg/kg, 8.0 mg/kg, or 16.0 mg/kg). A control group of four BALB/c mice was treated with PBS, administered subcutaneously twice a week for 3 weeks. Three days after the last dose of antisense oligonucleotide or PBS, mice from all groups were anesthetized with vaporized isoflurane in air at 2.5% for induction followed by 1-2% isoflurane by nosecone for maintenance. This was followed by cervical dislocation. Following euthanasia, liver was collected for RNA analysis.

### RNA Analysis

[1208] RNA was extracted from liver tissue for real-time PCR analysis of PKK. PKK mRNA levels were measured using the murine primer probe set (forward sequence ACAAGTGCATTTTACAGACCAGAGTAC, designated herein as SEQ ID NO: 2231; reverse sequence GGTTGTCCGCTGACTTTATGCT, designated herein as SEQ ID NO: 2232; probe sequence AAGCACAGTGCAAGCGGAACACCC, designated herein as SEQ ID NO: 2233). Results are presented as percent inhibition of PKK, relative to PBS control. As shown in Table 208 below, Isis 722059, comprising a GalNAc₃ conjugate group, reduced PKK mRNA significantly more potently than the parent antisense oligonucleotide, Isis 482584. This result is consistent with the results in the above examples, in which antisense oligonucleotides comprising a GalNAc₃ conjugate group were significantly more potent than their parent antisense oligonucleotides, for many target genes in both mouse and human. Thus, it is expected that human PKK antisense oligonucleotides comprising a GalNAc₃ conjugate group would likewise reduce human PKK mRNA significantly more potently than their parent antisense oligonucleotides that do not comprise a conjugate group.

TABLE 208
Percent Inhibition of PKK mRNA in liver relative to the PBS control

| | Dose | % | ED₅₀ |
|---|---|---|---|
| ISIS No. | (mg/kg/week) | inhibition | (mg/kg/week) |
| 482584 | 10 | 42.6 | 17.2 |
| | 20 | 53.3 | |
| | 40 | 71.4 | |
| | 80 | 90.8 | |
| 722059 | 2 | 50.1 | 2.09 |
| | 4 | 76.7 | |
| | 8 | 80.8 | |
| | 16 | 86.1 | |

### Example 137: Inhibition of Human PKK with an Antisense Oligonucleotide Comprising a GalNAc₃ Conjugate Group

[1209] ISIS 546254 and ISIS 721744, shown in the table below, were tested for their effects on human PKK mRNA in vitro.

TABLE 209
ISIS 721744, comprising a GalNAc₃
conjugate group and its parent, ISIS 546254

| Isis | | | SEQ |
|---|---|---|---|
| No. | Sequence (5′ to 3′) | Chemistry | ID NO. |
| 546254 | TₑₛGₑₛ^{m}CₑₛAₑₛAₑₛG_{ds}T_{ds}^{m}C_{ds} | No conjugate | 570 |
| | T_{ds}^{m}C_{ds}T_{ds}T_{ds}G_{ds}G_{ds}^{m}C_{ds}Aₑₛ | group and | |
| | AₑₛAₑₛ^{m}CₑₛAₑ | full PS | |
| 721744 | GalNAc₃-7_{a-o'}TₑₛGₑₛ^{m}Cₑₒ | 5′-GalNAc₃- | 570 |
| | AₑₒAₑₛG_{ds}T_{ds}^{m}C_{ds}T_{ds}^{m}C_{ds}T_{ds} | 7_{a-o'} | |
| | T_{ds}G_{ds}G_{ds}^{m}C_{ds}AₑₒAₑₒAₑₛ^{m}CₑₛAₑ | and mixed | |
| | | PS/PO | |

Subscripts:
“e” indicates 2'-MOE modified nucleoside;
“d” indicates β-D-2'-deoxyribonucleoside;
“s” indicates a phosphorothioate internucleoside linkage (PS);
and “o” indicates a phosphodiester internucleoside linkage (PO).
Superscript “m” indicates 5-methylcytosine.
The structure of “GalNAc₃-7” is shown in Example 48, and “GalNAc₃-7_{a-o'}” indicates a GalNAc₃-7 conjugate group in which the cleavable moiety is O-P(=O)(OH)-.

[1210] Subscripts: “e” indicates 2′-MOE modified nucleoside; “d” indicates β-D-2′-deoxyribonucleoside; “s” indicates a phosphorothioate internucleoside linkage (PS); and “o” indicates a phosphodiester internucleoside linkage (PO). Superscript “m” indicates 5-methylcytosine. The structure of “GalNAc₃-7” is shown in Example 48, and “GalNAc₃-7_{a′}” indicates a GalNAc₃-7 conjugate group in which the cleavable moiety is —O—P(═O)(OH)—.

[1211] Primary human hepatocyte co-cultures that include stromal cells in order to mimic the physiological microenviroment of the liver in vitro (HepatoPac kit HPHU-TX-96S, Hepregen, Medford, MA) were used according to the manufacturer's instructions. A concentration of Isis oligonucleotide listed in table below or PBS was added to each well in the absence of any transfection reagent. 96 hours later, cells were lysed and RNA was isolated from the cells. PKK mRNA levels were measured by quantitative real-time PCR using primer probe set RTS3454 and normalized to total RNA content, as measured by RIBOGREEN®. The results are presented in the table below as percent inhibition of PKK mRNA levels, relative to PBS treated cells; and IC₅₀ values were calculated using a 4 parameter logistic model (IMP Software, Cary, NC). The results show that, under free uptake conditions in which no reagents or electroporation techniques were used to artificially promote entry of the oligonucleotides into cells, the oligonucleotide comprising a GalNAc conjugate was significantly more potent than the parent oligonucleotide that does not comprise a GalNAc conjugate.

TABLE 210
Percent Inhibition of PKK mRNA relative to the PBS control

| ISIS No. | Concentration (μM) | Inhibition (%) | IC₅₀ (μM) |
|---|---|---|---|
| 546254 | 0.1 | 30 | 2.12 |
| | 0.3 | 25 | |
| | 1.0 | 24 | |
| | 3.0 | 63 | |
| | 10.0 | 85 | |
| 721744 | 0.03 | 34 | 0.07 |
| | 0.1 | 52 | |
| | 0.3 | 81 | |
| | 1.0 | 92 | |
| | 3.0 | 98 | |

The application's sequence listing, which the Patent Office published only in electronic form, follows.

SEQUENCE LISTING (2283 sequences)

SEQ ID NO: 1 - RNA, 2252 nt, Homo sapiens
  source 1..2252: mol_type = mRNA
agaacagcttgaagaccgttcatttttaagtgacaagagactcacctccaagaagcaattgtgttttcagaatgattttattcaagcaagcaacttatttcatttccttgtttgctacagtttcctgtggatgtctgactcaactctatgaaaacgccttcttcagaggtggggatgtagcttccatgtacaccccaaatgcccaatactgccagatgaggtgcacattccacccaaggtgtttgctattcagttttcttccagcaagttcaatcaatgacatggagaaaaggtttggttgcttcttgaaagatagtgttacaggaaccctgccaaaagtacatcgaacaggtgcagtttctggacattccttgaagcaatgtggtcatcaaataagtgcttgccatcgagacatttataaaggagttgatatgagaggagtcaattttaatgtgtctaaggttagcagtgttgaagaatgccaaaaaaggtgcaccagtaacattcgctgccagtttttttcatatgccacgcaaacatttcacaaggcagagtaccggaacaattgcctattaaagtacagtcccggaggaacacctaccgctataaaggtgctgagtaacgtggaatctggattctcactgaagccctgtgccctttcagaaattggttgccacatgaacatcttccagcatcttgcgttctcagatgtggatgttgccagggttctcactccagatgcttttgtgtgtcggaccatctgcacctatcaccccaactgcctcttctttacattctatacaaatgtatggaaaatcgagtcacaaagaaatgtttgtcttcttaaaacatctgaaagtggcacaccaagttcctctactcctcaagaaaacaccatatctggatatagccttttaacctgcaaaagaactttacctgaaccctgccattctaaaatttacccgggagttgactttggaggagaagaattgaatgtgacttttgttaaaggagtgaatgtttgccaagagacttgcacaaagatgattcgctgtcagtttttcacttattctttactcccagaagactgtaaggaagagaagtgtaagtgtttcttaagattatctatggatggttctccaactaggattgcgtatgggacacaagggagctctggttactctttgagattgtgtaacactggggacaactctgtctgcacaacaaaaacaagcacacgcattgttggaggaacaaactcttcttggggagagtggccctggcaggtgagcctgcaggtgaagctgacagctcagaggcacctgtgtggagggtcactcataggacaccagtgggtcctcactgctgcccactgctttgatgggcttcccctgcaggatgtttggcgcatctatagtggcattttaaatctgtcagacattacaaaagatacacctttctcacaaataaaagagattattattcaccaaaactataaagtctcagaagggaatcatgatatcgccttgataaaactccaggctcctttgaattacactgaattccaaaaaccaatatgcctaccttccaaaggtgacacaagcacaatttataccaactgttgggtaaccggatggggcttctcgaaggagaaaggtgaaatccaaaatattctacaaaaggtaaatattcctttggtaacaaatgaagaatgccagaaaagatatcaagattataaaataacccaacggatggtctgtgctggctataaagaagggggaaaagatgcttgtaagggagattcaggtggtcccttagtttgcaaacacaatggaatgtggcgtttggtgggcatcaccagctggggtgaaggctgtgcccgcagggagcaacctggtgtctacaccaaagtcgctgagtacatggactggattttagagaaaacacagagcagtgatggaaaagctcagatgcagtcaccagcatgagaagcagtccagagtctaggcaatttttacaacctgagttcaagtcaaattctgagcctggggggtcctcatctgcaaagcatggagagtggcatcttctttgcatcctaaggacgaaaaacacagtgcactcagagctgctgaggacaatgtctggctgaagcccgctttcagcacgccgtaaccaggggctgacaatgcgaggtcgcaactgagatctccatgactgtgtgttgtgaaataaaatggtgaaagatcaaaaaa

SEQ ID NO: 2 - RNA, 578 nt, Homo sapiens
  source 1..578: mol_type = mRNA
atgctctctctctctcctgctgccttgtgaagaaggtacctgcttccccttcaccttccaccataattctgaacacggataggatgttcatggaatatgttgacaggacaaaaagttgaaactgttggcagaaacccaaagtcaatattgaagccaagcaaaatattgcctgcagtgccacattagaacagcttgaagaccgttcatttttaagtgacaagagactcacctccaagaagcaattgtgttttcagaatgattttattcaagcaagcaacttatttcatttccttgtttgctacagtttcctgtggatgtctgactcaactctatgaaaacgccttcttcagaggtggggatgtagcttccatgtacaccccaaatgcccaatactgccagatgaggtgcacattccacccaaggtgtttgctattcagttttcttccagcaagttcaatcaatgacatggagaaaaggtttggttgcttcttgaaagatagtgttacaggaaccctgccaaaagtacatcgaacaggtgcagtttctggacattccttgaagcaatgtggtcatcaaat

SEQ ID NO: 3 - RNA, 681 nt, Homo sapiens
  source 1..681: mol_type = mRNA
ggaagccattcactagtcagattgaccagagattgttggtgggctgtctgttggggtctatgcacaggatttctgctggagttctaaggacaaaaagttgaaactgttggcagaaacccaaagtcaatattgaagccaagcaaaatattgcctgcagtgccacattagaacagcttgaagaccgttcatttttaagtgacaagagactcacctccaagaagcaattgtgttttcagaatgattttattcaagcaagcaacttatttcatttccttgtttgctacagtttcctgtggatgtctgactcaactctatgaaaacgccttcttcagaggtggggatgtagcttccatgtacaccccaaatgcccaatactgccagatgaggtgcacattccacccaaggtgtttgctattcagttttcttccagcaagttcaatcaatgacatggagaaaaggtttggttgcttcttgaaagatagtgttacaggaaccctgccaaaagtacatcgaacaggtgcagtttctggacattccttgaagcaatgtggtcatcaaataagtgcttgccatcgagacatttataaaggagttgatatgagaggagtcaattttaatgtgtctaaggttagcagtgttgaagaatgccaaaaaaggtgcaccagtaacattcgctgccag

SEQ ID NO: 4 - RNA, 2175 nt, Homo sapiens
  source 1..2175: mol_type = mRNA
agaacagcttgaagaccgttcatttttaagtgacaagagactcacctccaagaagcaattgtgttttcagtttcctgtgagggagttttctctgtgtccccacaaggcatgattctgggtctatggtgacttaagagggccacacaacaatgagtatttaattttcctcagatgtatggctacaataaacatctataggatgtctgactcaactctatgaaaacgccttcttcagaggtggggatgtagcttccatgtacaccccaaatgcccaatactgccagatgaggtgcacattccacccaaggtgtttgctattcagttttcttccagcaagttcaatcaatgacatggagaaaaggtttggttgcttcttgaaagatagtgttacaggaaccctgccaaaagtacatcgaacaggtgcagtttctggacattccttgaagcaatgtggtcatcaaataagtgcttgccatcgagacatttataaaggagttgatatgagaggagtcaattttaatgtatctaaggttagcagtgttgaagaatgccaaaaaaggtgcaccaatgacattcgctgccagtttttttcatatgccacgcaaacatttcacaaggcagagtaccggaacaattgcctattaaagtacagtcccggaggaacacctaccgctataaaggtgctgagtaacgtggaatctggattctcactgaagccctgtgccctttcagaaattggttgccaaatgaacatcttccagcatcttgcgttctcagatgtggatgttgccagggttctcactccagatgcttttgtgtgtcggaccatctgcacctatcaccccaactgcctcttctttacattctatacaaatgtatggaaaatcgagtcacaaagaaatgtttgtcttcttaaaacatctgaaagtggcacaccaagttcctgtactcctcaagaaaacaccatatctggatatagccttttaacctgcaaaagaactttacctgaaccctgccattctaaaatttacccgggagttgactttggaggagaagaattgaatgtgacttttgttaaaggagtgaatgtttgccaagagacttgcacaaagatgattcgctgtcagtttttcacttattctttactcccagaagactgtaaggaagagaagtgtaagtgtttcttaagattatctatggatggttctccaactaggattgcgtatgggacacaagggagctctggttactctttgagattgtgtaacactggggacaactctgtctgcacaacaaaaacaagcacacgcattgttggaggaacaaactcttcttggggagagtggccctggcaggtgagcctgcaggtgaagctgacagctcagaggcacctgtgtggagggtcactcataggacaccagtgggtcctcactgctgcccactgctttgatgggcttcccctgcaggatgtttggcgcatctatagtggcattttaaatctgtcagacattacaaaagatacacctttctcacaaataaaagagattattattcaccaaaactataaagtctcagaagggaatcatgatatcgccttgataaaactccaggctcctttgaattacactgaattccaaaaaccaatatgcctaccttccaaaggtgacacaagcacaatttataccaactgttgggtaaccggatggggcttctcgaaggagaaagggagattcaggtggtcccttagtttgcaaacacaacggaatgtggcgtttggtgggcatcaccagctggggtgaaggctgtgcccgcagggagcaacctggtgtctacaccaaagtcgctgagtacatggactggattttagagaaaacacagagcagtgatggaaaagctcagatgcagtcaccagcatgagaagcagtccagagtctaggcaatttttacaacctgagttcaagtcaaattctgagcctggggggtcctcatctgcaaagcatggagagtggcatcttctttgcatcctaaggacgaaagacacagtgcactcagagctgctgaggacaatgtctggctgaagcccgctttcagcacgccgtaaccaggggctgacaatgcgaggtcgcaactgagatctccatgactgtgtgttgtgaaataaaatggtgaaagatc

SEQ ID NO: 5 - RNA, 569 nt, Homo sapiens
  source 1..569: mol_type = mRNA
agtgccacattagaacagcttgaagaccgttcatttttaagtgacaagagactcacctccaagaagcaattgtgttttcagtttcctgtggatgtctgactcaactctatgaaaacgccttcttcagaggtggggatgtagcttccatgtacaccccaaatgcccaatactgccagatgaggtgcacattccacccaaggtgtttgctattcagttttcttccagcaagttcaatcaatgacatggagaaaaggtttggttgcttcttgaaagatagtgttacaggaaccctgccaaaagtacatcgaacaggtgcagtttctggacattccttgaagcaatgtggtcatcaaataagtgcttgccatcgagacatttataaaggagttgatatgagaggagtcaattttaatgtgtctaaggttagcagtgttgaagaatgccaaaaaaggtgcaccaataacattcgctgccagtttttttcatatgccacgcaaacatttcacaaggcagagtaccggaacaattgcctattaaagtacagtcccggaggaacacctaccgctata

SEQ ID NO: 6 - RNA, 392 nt, Homo sapiens
  source 1..392: mol_type = mRNA
ttgaagaccgttcatttttaagtgacaagagactcacctccaagaagcaattgtgttttcagaatgattttattcaagcaagcaacttatttcatttccttgtttgctacagtttcctgtggatgtctgactcaactctatgaaaacgccttcttcagaggtggggatgtagcttccatgtacaccccaaatgcccaatactgccagatgaggtgcacattccacccaaggtgtttgctattcagttttcttccagcaagttcaatcaatgacatggagggtttggttgcttcttgaaagatagtgttacaggaaccctgcctcaaataagtgcttgccatcgagacatttatggagttgatatgagaggagtcaattntatgtgtctggtt

SEQ ID NO: 7 - RNA, 802 nt, Homo sapiens
  source 1..802: mol_type = mRNA
gggtaatcctcttcagttacttcaggtcatctagatgtatacgtgcaggcctgggcccagaggcgacattcctgtcttcttatattaataagaaaaagaaaacgaaatagtggttgccacatgaacatcttccagcatcttgcgttctcagatgtggatgttgccagggctctcactccagatgcttttgtgtgtcggaccatctgcacctatcaccccaactgcctcttctttacattctatacaaatgtatggaaaatcgagtcacaaaggcgagtatgcatggaaaatcgcatcacaaaggcgagtatgcatggggagcacttgctgctgtactttcatcacttttatagtctgagttcttaaaagtttcgttcatttccctcaaaacacttgaacctgcagtttcagtaggtactgttctgccaggtgcagattagttaagagattagcagacttctctgcctatcttctcttactttaaaacaaatgttaccattgaatcaaggaagcaatagccatgagaaaaaagaaggatctgacgcctttgaatgaagattcaaaacatgatcttcatgttttgtattagcttggagtaaaatccacttgctggcaatatagcccttaagcttgttgcctcttctctttgtttcagaaactagagccctgtttattctgatcaaggctctggcccactgtctttatctcagataacccaccctcttctgcacacagcatggagctaagagaaggtgtctangtatgtatatcatcngcagcataaatcccagaattngtcntn

SEQ ID NO: 8 - RNA, 2058 nt, Homo sapiens
  source 1..2058: mol_type = mRNA
tcacctccaagaagcaattgtgttttcagaatgattttattcaagcaagcaacttatttcatttccttgtttgctacagtttcctgtggatgtctgactcaactctatgaaaacgccttcttcagaggtggggatgtagcttccatgtacaccccaaatgcccaatactgccagatgaggtgcacattccacccaaggtgtttgctattcagttttcttccagcaagttcaatcaatgacatggagaaaaggtttggttgcttcttgaaagatagtgttacaggaaccctgccaaaagtacatcgaacaggtgcagtttctggacattccttgaagcaatgtggtcatcaaataagtgcttgccatcgagacatttataaaggagttgatatgagaggagtcaattttaatgtgtctaaggttagcagtgttgaagaatgccaaaaaaggtgcaccaataacattcgctgccagtttttttcatatgccacgcaaacatttcacaaggcagagtaccggaacaattgcctattaaagtacagtcccggaggaacacctaccgctataaaggtgctgagtaacgtggaatctggattctcactgaagccctgtgccctttcagaaattggttgccacatgaacatcttccagcatcttgcgttctcagatgtggatgttgccagggttctcactccagatgcttttgtgtgtcggaccatctgcacctatcaccccaactgcctcttctttacattctatacaaatgtatggaaaatcgagtcacaaaggcgagtatgcatggaaaatcgcatcacaaagaaatgtttgtcttcttaaaacatctgaaagtggcacaccaagttcctctactcctcaagaaaacaccatatctggatatagccttttaacctgcaaaagaactttacctgaaccctgccattctaaaatttacccgggagttgactttggaggagaagaattgaatgtgacttttgttaaaggagtgaatgtttgccaagagacttgcacaaagatgattcgctgtcagtttttcacttattctttactcccagaagactgtaaggaagagaagtgtaagtgtttcttaagattatctatggatggttctccaactaggattgcgtatgggacacaagggagctctggttactctttgagattgtgtaacactggggacaactctgtctgcacaacaaaaacaagcacacgcattgttggaggaacaaactcttcttggggagagtggccctggcaggtgagcctgcaggtgaagctgacagctcagaggcacctgtgtggagggtcactcataggacaccagtgggtcctcactgctgcccactgctttgatgggcttcccctgcaggatgtttggcgcatctatagtggcattttaaatctgtcagacattacaaaagatacacctttctcacaaataaaagagattattattcaccaaaactataaagtctcagaagggaatcatgatatcgccttgataaaactccaggctcctttgaattacactgaattccaaaaaccaatatgcctaccttccaaaggtgacacaagcacaatttataccaactgttgggtaaccggatggggcttctcgaaggagaaaggtgaaatccaaaatattctacaaaaggtaaatattcctttggtaacaaatgaagaatgccagaaaagatatcaagattataaaataacccaacggatggtctgtgctggctataaagaagggggaaaagatgcttgtaagggagattcaggtggtcccttagtttgcaaacacaatggaatgtggcgtttggtgggcatcaccagctggggtgaaggctgtgcccgcagggagcaacctggtgtctacaccaaagtcgctgagtacatggactggattttagagaaaacacagagcagtgatggaaaagctcagatgcagtcaccagcatgagaagcagtccagagtctaggcaatttttacaacctgagttcaagtcaaattctgagcctggggggtcctcatctgcaaag

SEQ ID NO: 9 - RNA, 577 nt, Homo sapiens
  source 1..577: mol_type = mRNA
gttaccattctaaaatttacccgggagttgactttggaggagaagaattgaatgtgacttttgttaaaggagtgaatgtttgccaagagacttgcacaaagatgattcgctgtcagtttttcacttattctttactcccagaagactgtaaggaagagaagtaaaggaaattttatttttcaaagacagttgacatgaccatttcatattctctttccccctgtgaaggcttactctttctactgttcatttcatctaggtgtaagtgtttcttaagattatctatggatggttctccaactaggattgcgtatgggacacaagggagctctggttactctttgagattgtgtaacactggggacaactctggtgagtaacctcactttttcgtggacctgtcagggatgtctgtcatgttgatagtttgcttagtcttaaggaattatgtgtcttgttctccttggttagaagggactttgattcacttctaattccaaccattagcgtcaacgctctcttttcagtctgcacaacaaaaacaagcacacgcattgttggaggaacaaactcttct

SEQ ID NO: 10 - DNA, 37000 bp, Homo sapiens
  source 1..37000: mol_type = genomic DNA
agagcctctgcctagatttcacaggatgtgtggaaacacctggctgtccaggcagaagcctgctgcagggacccagccctcatggagaacctctattagggcagtgcagaggtgaactgtggggttggagcccacacacagagaccccactggagcactgcccagtggagctgtgaaaagagttcccccatcttccagatgccagaatggtagatccactgactggaaagttgcaggcactcagtgccggcccatgaaggcagccgtaggggctgtaccctgcaaagccacagggacagagctgcccaaggccttaacagcccacaccttgcatcagcatgccctgggtgtgagacaggggctccaaggagattattttggagctttaaaatttaatgacttccctgctaggttttgcatatgcttgggacctgtggcccctttattttggccaatttctcccatttggaatgggaacatttacccaattcctgtacccacattgtgttttggaagtaactaacttgttttttattttaaaggctcattgagggaagggacttgccttgtctcaaatgagactttggactcggacttttgggttactgtggaatgagttaagactttgggggactgttggaaagacatcattggttttgaaatctgaaaaggacatgagatttgggaaaggccaggggaagaatgatatggtttggctctgtgtcctcatccaaatctcgtcttgaattgtaatccccacatgggattacatgggaggggcctggtgagaggtgattggatcatggaggtggtttcccctgtgctgtgatctcatgatagtgagggatttaaaagtgacagtttcccctgcacatacacactctctctctcgtatcaccttgtgaagaaggtgtctgcttcccctctgccttccatcgtgattataagtttcctgaggcctccccagccatgggtaactgtgagtcagttaaacctcttttgtttataaattacccagtctcaggtagtatctttacagcagtgtgaaactggactaatacatctgggaaattctttttgtctccttcctttctgaaggacagctttgcctgatattatattcttggttgccaggttttgtactttcaatactttgaatatatcatcccactctctcttggcctacatgatttctgctgagaaatccaccaataatcttatgaagcttcccttgtatgtgaagaattgcttttctcttgcttctttgaaaattctctctttgtcatggtgaggatttcttttttttttttttttttttagatggagtctagctctgttgtccaggctggagtgcagtgtgcagtggcgcaatctcggctcactgcaagctccgtctcctgggttcacaccattttcctgtctcagcctctggagtagctgagactacaggtgcccaccaccacgcctggctaaattttttttgtatttttagtagagatggggtttcactgtgttagccaggatggtctcgatctcctgacctcatgatccacccatcttggcctcccaaagtgctgggattacaggcatgagccactgcacctggccgaggatctctttatatttaatctatttggagttcttttgggcttcataaatctggatgtttatttcatttatgtctccaaattttgagagttttctattcttatttttttaaataagtttctgcaactttctctttctctacttcttctggaactcttctaatgcatattaattttcttaacagtgtcctataagtcttgtcagctttctgcaatttttatcattccttttattactctgactgggtaatttcaaatgacctgtatctgagcatgctgattctttctcctgcttgatctagtctgctgctgaagctgtttgtgaattttttcaattcagtcattttgttctttagctccagaatttctgtttcattcttttttatggttcctatctatctttttgttgaacttctaattttgctcatgtattgttttcctgattttgtttactgtctatctatattgttttgtagcttattgagctttcttaaggcaattatttttagctcttgtcatgcagtaaagatctccatttctttagggtcacctcctgctgctttatttccttcctttggtggtttcttgtttccccgattatttgtgatcagtgtggccttgcactgaagtaggcacctatttcagtctttacatactagcttcagcagagaaagccattcactagtcagattgaccagagattgttggtgggctgtctgttggggtctatgcacaggatttctgctggagttctaaggtgggaagggctggattctgggttcattcactgtggttgtctgtattctgtgcacaaggactggcttgaagcatggatccttgggggctgacttggcactgaaatgagccttaagcctgcgtctgcaggggccagcctaacatggggatcacctggcacctgagttcatggggataggcctgttcctgagtttattcaggctgtcctgggaacaaggtccactggggtgagcccagcatctgggtccacatggcccagcatggagccaagatctctggaggctgacctggtgctggatctgcaggggatggcctggattctaggcccatgggtgccaacttggagcctggggttgctggggctaacgtggaggctagatagagtcttgggggccaggctagagctggagcaggcctgaagtctaggttttgtgtggccatcttggagcctgaagccccaggggctgacctggtctggggtgagcatggggctgaggccacagaggctggtctggcctgtggcaggcctgaatcctggtgctggggtttactggagtgggcttggtgcttgggatctgtggtgaagttaggttctatcttaactgtccctcctccatgcaagagggcatctctctccatactgtgctgcccaggcttgaaggtgagatgacaccggtaatgtgaaattgtccttcctatacacttctatgtgtcttttcttatttctgtgctgcaaccaggtggcataacctctcacctgattccttagctctagtgaagttattttcgtgcatggatacttgttcgaattgatgtttctgcaagggatgagcgctagaaactcctgttctgacaaactcctattcctattcttgctgacatcactccctgaaatagttaatatacttaacagctgaacacggataggatgttcatggaatatgttgacaggacaaaaagttgaaactgttggcagaaacccaaagtcaatattgaagccaagcaaaatattgcctgcagtgccacattagaacagcttgaagaccgttcatttttaagtgacaagagactcacctccaagaagcaattgtgttttcaggtagcaaatttttattattctgattgtttccaaataaactataatttttaagtataattttttactttatgagaaaattaatcatttatattctaatttcctgagtatgtagagagtatagataatgttcctttatgtagaaatatttaaatgtaagatgattttaaatcagaaagaatatttgattgatttaaaatttttaaatgggctttaatattttcagaggttttctttacttagggatttttggactgacattattgccattatttattaattttgtttttgcccaaatcaagaggtttcataattgtttactctctctctaccaattccctttccaacattactagccacagagttggccaatgaacaataaacacaacagtagtctggaggtctcaatttgtatcttgggaagcattataaattttccaactccctagacacaaatgtaccaaaaaaaaacccttgttttctataccagtaattgtgtgctttgtcttgcaattcagacatttacaagaaaatctaaatcaccttaaattaagatttatgttaaatgtggtctaaaaccagcagagttatgtattgttttcttttttagaatgattttattcaagcaagcaacttatttcatttccttgtttgctacagtttcctgtggtaagtgaattatctataaaacatggaattcaggctaagacaggagtagccaagcaagtggcaccacccctggagaaagctattgaacatacagcttcgggggtggagattgtccctgatgattcaggacacgtgtctatttaatgttccacaacaaggaccacttgtcaggtatattgctgtagacatatgttgcagaccagaggaaggagctcagaagtaggaatgtcttgggacttgtgttaacaaaaacttctgttcgcagatgacactctgcaaagcaaaacttgaaacaaaaaaaaattagtcctctatttttattatcaacagtaaaaaattaaactttatctgaaaattcaaaagagtgctaggcattttatagtgtctgggtccaatccaagtatctgttaggaacaccatacatagttttactctggaccgctagggaaccatttcaaaaatgaaagtaactggtttaaatttaacttagcaaaccatgcatttggatagttctaggtgaatagctttcaacaccagatttagatctcatttctctattaatttcattaatttttggagaataaaaatgattctggacatttcattaatcattacagagggagttttctctgtgtccccacaaggcatgattctgggtctatggtgacttaagagggccacacaacaatgagtatttaattttcctcagatgtatggctacaataaacatctataggtaaggtttacattcataaagagacctttttttttccaggaaaaaagacttttattccccctaaatcacaactcccctgtgtctgtccctcaaccctgatttctcttctaaaccgtaatttacaaacccatgtgcaaacccactgaaaggtgagaaggagcataagccagagacactgggaaccacagccaactacagggggtttttcatttttttgttttgttttgttttttggcaaaataaatcatgattatggctaggaaaatcagggatgtaagtaagcaaaaatttagaaactacatattgcatgtagtccccaaattcagaaacagtcatcgttaaacatcttttatttagtctttcagatatttttctacatatacctatttgcacatttcacaaaaaagagttattaactgtggacactctttgacttgcattttccacttatagctatcttttggtgcaaataagtaatatattttggagcttgctattcttctctttttatggtatttttgtgtgcacattcttatgctcttattcagttatttctgtagaatacaatttttgaaataaaaatactagattcaaaggtgtgaatatttttgaaggttttgtggtgtggtatcatgaaattaggtttcagaaagtttactccatagttgactttttctaccagctaataagagtgctcatttaccccacttaggccaactctaacaggcttctgttgctttgcatcctgacatatttatctttctggaaacagtgtcctaatttatttctgcagagctactgcctctcagttttggtccatgtggttctggtgaccctgattcttctgctgaaccagaaagtgcacacatcctcctggctgtggtgacccaatcagagccaacgtcttgcaatgaagcttttctttagacatctagaaataagactcttatgttttttttttccaatttgacttgaaacttaagacaatacacaggcctgagttgttggtactattttgctactacgtggagcttgagagtaatggtaacaccaagactggagcaagtggaaggagacatattgtccactgatgctatcagttgagcacaatgtgcagttactttttaagccagattcaccatgggctttttggctcctgaaccaatagatttcatttgttttcaagccactttgtactaggttttccatcatttgcaatcaaaaccagtatacaaacactggttatttaatttttcatttttgctaatctcagggataaaatggcttctagttgttttaacttggctatatttgtgattcttcccattttcatatacttactaatcacttctatttcttttgtaaattatcttttcatatttgttatctaattctttaaaatttgagtactttaattctcattattgtttgtggaattgttaaacaagactgaataatctgcccaaagtccatggacatgggggcccatgtaaaagctttgaaagccaccatcattatgagataaattatataatagtactttacataggctccaaaatacagcacagacacagctatcattgtcatggtcatcattatcatcatgatcaccaacttatgaggataagcaagaacacctactagaagtttctttccattcagcaacaaaattggtgtctttctagtcactcccttccctgactgtcacatagcagttcacagaggctcagttgcagaatgagaagctctgggccaggacctgccattgtatgcatccttgcatgggaactgggggctggaagaggagtgactgcttgataattatgagtcagtcaaaaccaccaactgtctgaaaaaaataggcctttttgtaactagtattgtcactaaaccaactcctccatgttttgtgcatacatgaaatctaggcaatacacttgtattcccaaaagcttccacttgaagagatctgtgctctttccaaatataaaccttacccgagaggtggtcatcttggccacacctcagagagggagagaggcagtcttgttgggttgggtggtcataatggggctcagggccaaatccccagggggtaggatagtgcagagaagatggcactctccagtgcttaataaaatgcacgtggtctaagctgcccactccctcaaaggcaataaaaaataggtactatttaaattgaagagtaactactgccccagggaatggacaggttgtcattggaatagccatggttaatggtcccagttgacaactgaaatgaatgtgctacctgaacaggaaagcttattaaccagatttcaaagacagtctttcccggtaaatccaaatttacaaattaaagccagtaaagacaccgaattctctaataatatgtggggtgcagtatattttagagctgggaataattccaaacagcaaatagttcaaaatttattttcaatttagcatatgcatgcatttgcttaaactgtcttaaaaatgagtaaaaaatactgtcagtttgtttcaatcatactgagatgaggaacaatgtttagcattgcatgctagaaaaggacacaggattgggagtcagggctgggtgaccgtcacaggactttcactaactgtgtggatcttgggcaagtctgtgtgccctgagactcagttatttaactttcttttaaaaaacatagtccagatgcagataacaaagcctgcctctaatttcccttacagaattgtgagaagctggtggagatgtttgttacaaaagtgttttgaaaatagagcaaatattattctttttaaggcatgatgttttcatagcatgtcaggcaacaggaaaaaactaagttaggattttattttattgtggggaatttatgtgcaaattattgtgcaatttaatgaaaataagccaatgttttatacagaagtacccagaaaattaaataacactatacattgttcaaatagttgccttaatatattttattttctcagcataattagagttgtattatacaggtctttgagtagtcagtcagtgggagaagttaagacaacagatatctttttattaaaattattatatgaattatcgcaaattaatttttatggttctgtcacaggatgtctgactcaactctatgaaaacgccttcttcagaggtggggatgtagcttccatgtacaccccaaatgcccaatactgccagatgaggtgcacattccacccaaggtgtttgctattcagttttcttccagcaagttcaatcaatgacatggagaaaaggtaaaagttggtatttcattattggagaagctgtttttcaaaactgaatcagttttgtgcagaaaggtgtagtataactgagagttcttcctcacacggggttcaaggaccagcttcagcaaaatcccgtcaagtggttcttacaaatgcagattcctaggccacaacccagatctgctgaaccaaagtttcttgtgaccaggaatctgcattttaaacaatcactgtgtttctttaaagtagtagaagctagtcattttctattcaaagcctcaaaatgcttgaatatcattgggctaagggattgtctcaagaaagagtctaacaggtgcacatttcatctgaataaagaaacagatttaactgtgtgacccatgatcacattagcggatagcacagtccaaagaaaataacataagacaagcattttgctgagaatgtaattgagaaagatctagaacttgtgattttgggacagggcagttctaaatggggcctatagtgagccagtttgggcacctgtggcatgatgctatgtatggtgtgtgtgtgtatgtgtgcttgtgcttgtgtgaatatgtattattaactggaaatttgtaaaagtattggaaaaatagtacttacgattttgtgtgtgtgtgtgatggagtctcgctttgtagcccaggctggagtgcagtggcgtgatctcggctcactgcaacttccacctcccaggttcaagcgattctcctgcctcagcctcccaagtagctgggattacaggcacgcaccaccacgtccagctaatttttgtagttttagtagagacggggtttcaccacattggccaggctggccttgaactcctgacctcgtgatccacctgcctctacctcctaatgtgctgggattacaggcatgagccaccgcacccagcggtaattacaatttttattaggtcagagagatgcttattaatcacgagccacagtttcatcttaatgatttttccttttgattaatatccagagtaagcttttctttgttgttcccatttccatgttcataactctttactcatcttcactctatgtgagtttaccaactagaaattggatagtcattctctgatcccacatgttaaacttgtagagaaaactcagattgtatgtgaggatcatcatattaaaagtggaggaaggttctagaattcttataaataatgaaattaacatgaaggtggacatctaagacagagggaagtcttccattaagtgcagactacaaggagttaataagcaagatgaacacgatatacaaatccagctcttatcactaagttaactttttaagtaaatgaaagtatttgcaaaaataattaccaattgagaacatagttgcctgaaagtttaagaacacaggaaaaatcattaactctttaatatggttgatttcctgtacttaaaaaatgtgagtgtaaagaaaacgcagtgatggagttagatattatggggtgttataaaattagctctaagagtgttctttccagcaagtattggggaagctatattattttccttattcctggttttatttgttagtgtgtagaaaatgctagacatttcctcaatgtatgtttattattctacttcctaagtaaagctacttttaaaataggtttggttgcttcttgaaagatagtgttacaggaaccctgccaaaagtacatcgaacaggtgcagtttctggacattccttgaagcaatgtggtcatcaaataagtggtaagttgtgaatttcttagctacatttgagttaatattggatctcgcttagaacagcttttgctcaaagtttgtactgctacagctttttggaaggcatcactcataaagataggagatggggcagtattctggacacaaaagagggacccatattcatctggacacttctattgtctttataaatcaacacatacttaatgagcctctattatttatgaggttagcgctcaagtgtaagatttgcagaaaatgaatccaaataattgtgtctcgtttccagataagaatttttaagaaaacacaagggaacatctctctcaagttcacttgagggtaatttttacatcagtgattctcaaccagcagtgattttgtctcttccactggggacatttgacaatgtctggagacatttttggtggctacaactagggaggatgctattagcatttactaagtagaggccagaatgtttgaatgctgaccaacattctacaaggcacagggcagtcgtccacagcaaataattttctggcccaaaacgtcaacagtgctgacatcaagaaactctgtgatataccactaggcccaaattgaagaactgagttctgcaaatcttgctaagaataatacttcctaaaggaaacttgaggactaggatgctagagaactttgattctgacatctgaagctactgatgtcttgggaaacagtttccaatgctatcctaataaatttaagacaaatgaactatttctcaaacatgactgggactgataagaaagtgaaaagtgctgaaaagattcaactgatgggttgtcagaatcttaaaataactgctgttattctatgtatgactatatatcattactattttattttcattatgcacaattaattttgtaggttcaaatttcagatgtttttaaatttgtcatcctttcctccctcattgatatcacctcttcaatacgtacacactttgagcctgctgtttgcattttaaccagttatcaaaggatggcaatgccttcattataaatgtgggcctgacttagccagtataataggtgtagtctacgtgaggtggagtacatttcctattttaaaagatcaatttttatgttaatccaatttggtataaattattcgagtaagtgctatttctgattgttgtatcttgtagcaaaatttaaagaaaaagtaatttgtgcctttctcaatattcctgttattgttcatgtattctaaaactcactgttactcacttagcttgcttttaatgttttttaaagtgaaaaattgttcccaagtacataaaatctctacactcaagaacaattctagtcaaaagcatttagagcttccgtatgaacacttaaagagtttttatttgtaagagtcgcatcccaactcttagcctgttcttttctcacatgcagaaaaataggaaagagacttcgtttccacagtctgcaaattcctgtgtttaagaaccacagtgaataatccacctccctgcccaactcatcgtactgtcatatagttttcctgacagtttgtgtattttctgtctttcccacccttaaatttagttttatgacttcaaccatacttcttaggagtggaaaggtatctgtagtagattatggtttattccacataatcttggggaataaaactttaaaaaagtatacagtttatacttctggttacattacttccttaaccaaaagtctaaccaagaaatttgaatctttaaaaaaaaaagaggccgggcgcggtggctcacgcctgtaatcccagcactttgggaggccgagacgggcggatcacgaggtcaggagatcgagaccatcctggctgacacggtgaaaccccgtctctactaaaaatacaaaaattagccgggcgtggtggcgcgcgcctgtagtcccagctactcgggaggctgaggcaggagaatggcgtgaacccgggaggcggagcttgcagtgagtcgagatcgcgccactgcgctccagcctgggcgacagagcgagactccgtctcaaaaaaaaaaaaaaaaaaaagagcctaattttgcttcactgtctgtgaaaagaattatctgtatcttttgcatgtaagacaaatctcaatgaaaagggtgcttaaatagaagttaacactattttaaagcaagaatggaagtggtttcatcatgcgtaaacaacaactctccacattttgtaatgattgatctggatgcaatttgtcatcagacaggagaagtcgaaagcaaagaaataacactgggagatagagaagctctttcattcaatgcgaaaggtcaaaggcacatcagtttctttaataatgcaaacctcagcacacattatcagtgtcctcattattattgccttgtttatttcccactgctcattgataatttcaacgtgaaatttacctgtattgctgcatgcatcttgcagtttaagaagtgaagtaacccaatttcaaagctagtgctttagggaaaatattggattgtatttacttcaagcagagttcgataatttatgtacataataaaaattttaaatcccttagttaatatagcagttgccaaaactgggctattatcattctaaactaccaacccaaatggtagtgggtatctaatctacctctagaaagaaaatggactgtatttgctctatgtatttttcttgtacagcttgccatcgagacatttataaaggagttgatatgagaggagtcaattttaatgtgtctaaggttagcagtgttgaagaatgccaaaaaaggtgcaccagtaacattcgctgccagtttttttcatatgccacgcaaacatttcacaaggcagagtaccggtgagtacaattcaaggtgtgtgttctttgtattggtgcctccaggatttcactgtattcttcttaacctcttttgttcccaaactaaaaaccaaacagggcttttattctaaccactttcctcatttacttactctattttatttttttatcttttatttatttatttatttattgagatggagtcgcgctctgtcgcccaggctagagtgcagtggcgtaatctcgactcactacaacctccgcttcccgggttcaagcgattctcctgcctcagcctcccgagtagctgggattacaggcgtccgccaccatgcctggctaatttttgtatttttagtagagtcggggttttactatgttggtcaggctggtctcgaactcctgatcttgtgatccacccacctcagcctcccaaagcgctgggattacaggcatgagccactgcgcctcgcccttcattttttaattaaataattcatttaatttcatttgtttctctactcttttcccctggcatgtaattgtaccgcatcttcaaagcctgacatcctcttcccctacttctccaaagctgattcttgcaggtctttcctcaaataccgtcccctccaaaagcccatttctgagcattctcttttaagtcacactcagctctgtttatttcattcatagagctaatcacaatttgatattaacttgtgatttttttccttatttttaaatcttatttttatttgcatagatgtatggggtacaagtgtaattttgttactttgatgtattttacagtggtaaagtctgggcttttggtatatccatcactggagtcatgtacattgtacccactaagctatttttcaacgcccgcccccttcccacctctctgtcaccttcccagtctctactgtctatcgctccatgctctactcaattttggtgtcattttttcctgaagcaaaattttggtgtcattttttctgaagtcattttctgaagtctgtgtcatttttcgctttcctgaagcgaattttggtgtcatttttcctgaagttccgtttgccccacacataggccttgcttatagaatgagggtttagtgtcacggagtctcctgcctcattctcaccctaacttttcctttacccctttgcgaggggaaggatgtccattaggttaataatgcagacccctaacccactcattatcagggtcattgtttttccactgtgcattttaatactaactgttacctgcactgctccctgcccctcaaagtgcagaaagcaaagtaacctcttttcttcccattcaggaacaattgcctattaaagtacagtcccggaggaacacctaccgctataaaggtgctgagtaacgtggaatctggattctcactgaagccctgtgccctttcagaaattggtaattgtaggactacttcactttgtgattgtggtaggtggaataggagcccccagagacgtccctgtgctgagccctgggacctgtgcgtgtgttcccatagctggcaaaagcgtttctgtcaatggcatgcagttacgggcttcgagatggggagtttactctggattttctgaatgggcccaatgtactcacagggttgagtgctcacaaggctcataagaaaaagagagaggcggaaggctcagagccagagagagaggtttgaaggtattacactgctggctttgaagatgaaggtccgtgagccaaggaatgcaggcggcctctagaagttgaaaagggcgaggaaagagtttccctgtggagcgtcctggaggaagaagccctgctgatgtcttgattttagcccagtaagacccaatctctagaacagtaagataattaatttgtgttgtttttaaccactaagtttgtggttatgcccctagagcagcagttataggaaactagtacagtgatactgttagagttataggacagtgatataggacagtgatactgttatagttataggaaactagtacagtgatactgttagagttataggacagtgatataggacagtgatattgttatagttataggaaactagtacagtgatactgttagagttataggtacagtgatattgttatagttataggaaactagtacagtgatactgttacaggtacagtgatataggacagtgatactgttataggaaactagtacagtgatactgttagagttataggtacagtgacataggacagtgatactgttatagttataggaaactagtacagtgatactgttagagttataggtagagtgatataggacagtgatactgttatagttatagaaaactagtacagtgatactgttatagttataggacagtgatataggacagtgatattgttatagttataggaaactagtacagtgatactgttagagttataggtacagtgatataggacagtgatattgttatagttataggaaactagtacagtgatactgttagagttataggtacagtgatattgttatagttataggaaactagtacagtgatactgttataggtacagtgatataggacagtgatactgttataggaaactagtacagtgatactgttagagttataggtacagtgacataggacagtgatactgttatagttataggaaactagtacagtgatactgttagagttataggtacagtgatataggacagtgatactgttatagttataggaaactagtacagtgatactgttatagttataggacagtgatattgttatagttataggaaactagtacagtgatactgttagagttataggtacagtgatataggacagtgatattgttatagttataggaaactagtacagtgatactgttatagttataggacagtgatataggacagtgatattgttatagttataggaaactagtacggtgatactgttatagttataggtacagtgatattgttatagttataggaaactagtacagtgatactgttagagttataggtacagtgatataggacagtgatattgttatagttataggaaactagtacagtgatactgttatagttgtaggacagtgatattgttatagttataggaaactagtacagtgatactgttagagttataggtacagtgatataggacagtgatactgttatagttataggacagtgatattcttatagttaccgtggtatagttatagttaaaggtacagtgatattgttatagttataggacagtgatattgttatagttataggacagtgatgtagttacagtgatataggtacagtgatattgttatagttataggacagtgatatagttataggacagtgatattgttacagttataggtacagtgacgttgtaatagttataggacagtgatattgttatagttataggtacagtgatgttgtagcaaaactgtaaggtcattccttggttgtgtccctatctagtgaaatgactctaccaggggtagggaaataaaactctgtcgtttcacacataaaggtaatttcaatggaattatccagaaaattgccatgacattccacctcatttagcatgtcaggatgttaatgacaagatgttactaaaagcaaatcccttacggccagttttccgcagtactgggtgctggctctgtgcctggccctgtattgggtgctgggctaggatttccctgtggaagattgggaaggttggttacaaggtggctattttcctgtctcctctttgcgacagcacaccttctccatggtgtgtgccaggttcacgtgtactggtgatttaattttaacgttcatattatttttttctgggagagtttttgaaggctgccaggaggcaggactcgatgcaaacatgctccattctgtacccagccctgttgctggaaggatttgctgcacttacccagggaacaggcaagctcgtgctgtggctctgggctgtcacagctgctgtccacacctgggagagcaccctggatggctcatctgtgtacttgctttcttgttaaattgcagtgagttcacatgtgatttaatcggatcaaatggcctttacagactgataaaaatatggctgtttcaggtggtgttttgagctgctaagggcgtggcttttcactgagtacgtggtccccgttcctcagggaacacccagtagccacatgcctcctaaacctagagtagggctgtctcctggcctaactgcccaaatgagattcataagttagggatgatctgtagttatcactacagatttgtccttggtttcaccaaggattttcctaattttacaaacaaaacccctaaggctcctggaaggagggtagaagtgaaggtgctccgggggcaacacagctgatgagctgaaccagaactcgacccttgggtcacacacatttcacagtgctcactccaccttttgtttttttaatggatttaatggtgttttaaagcctcctgcctctcaacacatatgaattcattatatttacagatttccttctcttgtggtccatcttcctgcatagatcttgagagatgtcaggctaaccacgtttcctcagttaatttaacaaaaccatttgcaactctgacatggaaaattcctaccatgtgacttattaatttatcaattgagatggtacacatattttcaagccaaaaggaggaaaacataaattggaaaaaaaaggtttttttatttttatcacctctggggaagaaagtctgataaacgaagctggttgataaaattgcaattaggggaagcaacatcatggtttctgttcggaggctaaccagatggcatacttgaaatagagaatgtcctagaaatcaactggttgcttggccaaaatatctataaatagtgcccaacatattagataggaaaagcaaagtaaaaacaattttaacaggttaggacattgggctgaagtattgcatatatttaatgtcatgtgcgtccgtgtgaagagaccactaaacaggctttgtgtgagcaagaaagctttttaatcacctgggtgcaggcaggctgagtccgaaaagagagtcagtgaagggagatggggtggggacgttttataggatttgggtaggtagtggaaaattacagtcaaagggggttgttctctggcgggcagcggtggggggtcacaaggtgctcagtgggggagcttctgagccaggagaaggaatttcacaaggtaacgtcatcagttaaggcaggaaccggccattttcacttcttttgtctttcttcagttacttcaggtcatctagatgtatacgtgcaggcctgggcccagaggcctgacattcctgtcttcttatattaataagaaaaagaaaacgaaatagtggtaaagtgttggggtggcgaaagtttttgggggtggtatggagagataatgggcgatgtttctcagggctgcttcgagcgggattaggggcggcgtgggaacctacagtgggagagatgaagctgaaggaatattttatggtaaggggtgatattgtggggttgttagaagcagcatttgtcatatagaatgattggtgatggcctggatatggttttgtgtgaaatgagaaactaaatggaagacacaaggtctgaataagagaaggagaaaaacaggtgttaaaggactaagaattgggaggacccaggacatctaattagagagtgcctaagggggttcagtgtaattacttgcttggttggtgagtttttgggctctatccttgacagagtcctcctttttaagttggaggctgagcttggtgaggtgtgtttttaaaagaccattagtctgttctacctttcctgaagattgaggatggtgaggggtatgaaggttttactgaataccaagagcctgagaaactgcttgggtgatttgactaataaaggccggtctgttatcggattgtatagagatggaaaggccaaactgaggaattatgtctgacagaagggaagaaatgaccacggtggccttctcagaccctgtgggaaaggcctctacccatccagtgaaagtgtctacccagaccaagaggtattttagtttcctgactccgggtatgtgagtaaagtcaatctgccagtcctgggcgggggcaaatccccgagcttgatgtgtagggaagggagggggcctgagcaatccctgaggaggagtggagtagcagatggaacactgagcagttattttttgaggatagatttttacgacggaaaggaaaagtgaggttttaagaggtgggttagtggcttgtaacttacatggaagagtttatgaaatgatgacagaatagaatgggcctgtgaggctggaggagatattttccttggtccaagaattatttgccttgtgtgggaagagattgataggtggaagtttcaatgggggagtagatgggagtgacagatgaggaagaaaaaaactggctgtgagggatagaagttggaatgctcgctgcttttttagctaccttatcagcataggcattgtcctgagcagtgggatctgatgccttttggtggcccttgcagtgaatggcttcagcttcctttggaagtaaagtggccttgagaggagtttttattaaagaggcattaagatggagaacccttgtgtagtgaggaaacctccttcagcccatataaccgcatggtggtgcagaatatggaaggcatatttagagtcagtataaatattgacacgtagtccctttgcaagagtgagggcctgagttaaggcaatgagttcagcttgctgagaggtagtggagcggggcagagcagtagcctcagtgatagatgtggaagatactacagcatagcctgcctttgctggtgagtggtgattaggcctggtggaactgccatcaataaaccaagtgtgatcagggtaaggaacaggaaagaaggaaatatggggaaatggagtggatgtcaggtggatcagagagatacagtcatgggggtgggggccagcctaaaacagtaaggtcaagttgtttgaacagaaaggctacagggcgtggtcctggctcttgtgtaagaattttgactgcgcagccctgcacttcggctgtgtgtaatgaaaagggttgggatgagttagggagagctagtgtgggagcagtttctagggctgtttttaaggaatggcaagaggagtggctaaaggatttaggatctttggggtcagctagctttgcttttgtgagtttatataatggtttagtcaggatggtaaaacttagtatccaaaggcggaagtacttaaccatacctaggaagaaaaggagttgttttgtagaaggggttggggtttgggagatgagccagacacaatcagcagggagagcacatgtgttttcatgaagaattatgccgagataggtaatggatgaggaagaaatttgggcttgactgaagtaatgggggctgtcctcgaagccttgtggcagtacagcccaagtaagttgctgaggctgacgggtgtcagggtcagtccaagtgaaagcgaagagaggctgggatgaagggtgcaaaggaatagtaaagaaagcatgtttgagatccagaacagaataatgggttgtggagggaggtattgaggataggagagtatatggctttggtaccatggggtgaataggcaagacaatttggttaatgaggcacagatcctgaactaacctgtaaggcttgtccggtttttggacaggtaaaatgggggaattgtaaggagagtttataggcttcaaaaggccacgctgtaacaggtgagtgataacaggctttaatccttttaaagcatgctgtgggatgggatattggcattgagcggggtaagtgtgattaggttttaatgggatggtaaggggtgcacgataggttgccaaggagggagcagaggtgtcctatacttgtggattaaggtggggacacacaaggggaggatgtgaaggaggctttgaactggggaaagggtggcattgaggtgtggctgtggcctaagaacagtcagggaagcggataattgagttaaaatgcctcgacctagtaagggagctgggcaggtggtgataactaaaaaggagtgcataaaagaatgttgtccaagttggcaccagagttggggagttttaagaggtttagaagcctggcggtcaatacctacaacagttatggaggcaagggaaacaggcccttgaaaagaacgtaatgtggagtgggtagcctctgtattaattaagaaggggatggatttaccctccactgtaagagttacctaaagcatctgtgatggtccaggaggcttctaaggtgatcgggcagcgtcagtcttcagccgctaagccaagaagatctgggaagcagtcagtcagagagccttgggccagagttccaggggctctgggagtggcagccaggccagttagacagtccgatttctagtggggtcccacacagatgagacacagcttaggaggaatcccaggctgcgggcattccttggcccattggccagatttctggcacttgaaacaagatcctgatggaggaggtcctgtaggaatgcttgaccactgcagtttaggcattttgaagtttttgtgtgtgctggagatgtggctgggttttgtctcacagcagaggcaaggaatcgcaactcagaaatacattgctacttggctgcctctattattgtacatcttgaaggcgaggttaattaagtcctcttgtggggtttgagggctggaatctaatttttggagtttttttttgtttgttttttggttttttttttttaatgtcaggagctgactgggtgataaaatgcatattgagaataagaggccttctgacccttctgggtctagggctgtaaagcgtctcagggttgctgccaaacgggccatgaactgggctgggtttttcatatttgatgaaaaagagcctaaacgctaactgatttgggagaggtcggataaataaaaaggaacattaatcttgactatgcctttagctccaaccacctctttaagaggaaattgttgggcaggtgggggagggctagtcgtggaatgaaactgtaagctggaccgggtgtgaggaggggaggtgatagaaggattatagggtggaggagcagaggctgaggaagaattgggatctggcttggcctggcaaggagcagcctggggaggaggggagaggtcagatgggtccatagaaaaggaggattggaaagactcagcaacacttggggttgggattgagaggacagatgggttgggattgaggggacagatgggagggaaagaaggaagatttgggacaagttgcattgggaacagagactagggagggaccaatgtgtaaaagaatgcctggacgtcaggcacctcagaccgtttgcccattttatgacaagaattatctagatcttgtaggatggaaaaatcgaaagtgccgttttctggctatttggaaccattgtcgagtttgtattggggttaagcagcattgcagaagaaaataaggcatttaggttttaggtcaggtgtgagttgaagaggttttaagttcttgagaacataggctaagggagaagaaggaggaatggagggtggaaagttgcctatagtgaaggaggcaagcccagagaaaagagagggtagagacatggagagaaggggtgggggggtgcttgcccccaggaaagtggttcttgccactaagggtgaaggatcaaggcaggcattcgcgcggtgatcagatacctctgaaacgtgggtgaataatcaagcaggtgtccctgcagtgattaaacagcaaggaaagactatcttcccaagtccatgaccagtgccagagttttgggttcatggataaaacgcgtctcctctgtctctaccagaaaatgaaaggaattgaaattaagagaagggagagattgaaggatggcgccaagattgaaaggaaaaagaggttgagggatagggagagaggttggataagagagtaaaaagaggctgcttacccaatttaaaatcggtgagatgttccttgggcttgttggtctgaggaccagaggtcatgggtggatctttctcatggagcaaagagcagggggacaggggattgatttcccaagggaggtcccctgatctgagtcacagcaccaaatatcacgtgtgtccatgcgaagagaccaccaaacaggctttgtgtgagcaagaaagctttttaatcacctgggtgcaggcgggctgagtccaaaaagagagtcagtgaagggagataggggtggggacgttttataggatttgggtaggtagtggaaaattacagtcaaagggggttgttctctggcgggcaggggtggggggtcacaaggtgctcagtgggggagcttctgagccaggagaaggaatttcacaaggtaacgtcatcagttaaggcaggaaccggccattttcacttcttttgtcattcttcagttacttcaggccatctggatgtatgcatgtaggcttgggcccagaggcctgacatttaacatggataaatgtaaagttcttagaatcatacatacactttggaaaagatggggcttaatcgcactttataagacttgaaggatgtttgagaatcactatgaaactgctgaaaataccaagaaaatttaattcttatgtatataaataatgtgtctgttttacatgaatcccttctacaagcttggtatttaatatggcatatattgttttttcatagtagatttaaaatttttgatatctaatttagataacataaaattaaccctttgaaagtgtacaactccgtggtttttagtatatccacctgattgcacaacgatcaccactgtctagttccagaacatttttatcaccacaaaagaaaggctgtatccaggccgggcacggtggctcacgcctgtaatcccagcactttgggaggccgaggcgggcggatcacggggtcaggagattgaaaccatcctgggtaacacggtgaagccctatctgtactaaagatacaaaaaaattagctgggcatgatggcagatgcctgtagtcccagctactcaggaggctgaggcaggagaatggcctgaacccaggaagcggagcttgcagtgagccaagattgcgccactgcactccagcctgggcgacagagcaagactccatctcacaaaaaaataataaaaataaaataaaaaaaaaaaagaaaggctgtctttctcctttcccattggccgtctttctccattccctactcctccaatcccctggcaaccactaaatctactttccatgtctgtggacttgactcttcgggacattttacataaatggaatcatgcaatgcagcacattttgcatctggcttttttcacctggcgtgttttcaaggctcattcgtattctagcatatatcaatactttgttcctatttaggactaaataagattctattgtatgaataaaacatattttgtttatatacttagtttgatgaacatttgagttgtttctggatttttttttttttttttttgcctcttatgaataatgctgctatggacaacagtttttgggtaggcatgcattttaaattctcttatgtatatacttaggattaaaattgctggatcacagagtaactccatgtttaactttttgatgaattgccaaactgtttttgagagcagctacacaatgttacattcttaccagcaacaattgagggcttcagtctctctacaaccttaacaacacttgttattgtctttgtaattattgcctttctaggcagtgtgaagtggtgtctcactgtggttttgatatgcatttccctaatgactaacaatgttgtgtatcttttcgtgtgctcattttcaatttgaatacattctttgggaaaatctctgtttaaatcttttggccattaaaaataattgggttattttcattgttgagttgtatgaactctttatatactctggatactacactcttatgacatatattattttcaaaaattttctgtgcatctgcaggtcatcttttcactttactgatggtgttctttgaagcaccaaagtttttaaacttgatgaaatccagtctggctttattcttgcacgtgctttacctaaaacgccaaaacctaattcatggttttgaagatttttgcttatgatttgttcttagaggtttatagttttagctcttacatttaggcatttgatgcattttaaattaaattttgtatatggtgtaaagtagcaatccaacttaattcttgcatgtgggtattcagttattccattgtcttgaaacccttttcaaaatcaattgtctataaatgtaagagtttatttttggaccatcagttctatcctgttgacctatatatgcctatcctaatgccagttacacacagtcttgattaccataactttgcagtaagttttgaactcagacagtctgagtgcttttattttgtcctttttcaagattaatttggttattccggatcttttgcatttccatatgaattttaggatggttgtcaatttctgcaatagaaaagcagcaggattttgatagagagtgcattgaatctgtagaccaatgagtatcaatggaattatgtgttatcaaatttagtaaactacataaacgatatgtacacaactaaaacaaaactaagatataagatcatattaatgtaatgataataaaagtggattgtctcctgttctaattttaataggcacaaggcatttttgttaatcacttcttattaaagaattttttataatattcaggaaaatacaacaaaaaaacccttacattcctaaggcctcagagtcagagtaatataaaggaaatgtaaacacatgctgagtaatgcaagcatttggcaatggtggtgactggagctgggagcacagcttttatttctctgaaataggaatttgccccttagagttagaccaattttgccttcctctaaatggcaaacagtttggagatactttaaaggacattttttcacttaggatgtttagtactatgaataataaatagtcacaatttccttaactatggtgacaaaatacaagcaaatttagcctcatgtcatttcctaaggaacatcttctctctgtgagttcacaggttgccacatgaacatcttccagcatcttgcgttctcagatgtggatgttgccagggttctcactccagatgcttttgtgtgtcggaccatctgcacctatcaccccaactgcctcttctttacattctatacaaatgtatggaaaatcgagtcacaaaggcgagtatgcatggaaaatcgcatcacaaaggcgagtatgcatggggagcacttgctgctgtactttcatcacttttatagtctgagttcttaaaagtttcgttcatttccctcaaaacacttgaacctgcagtttcagtaggtactgttctgccaggtgcagattagttaagagattagcagacttctctgcctatcttctcttactttaaaacaaatgttaccattgaatcaaggaagcaatagccatgagaaaaaagaaggatctgacgcctttgaatgaagattcaaaacatgatcttcatgttttgtattagcttggagtaaaatccacttgctggcaatatagcccttaagcttgttgcctcttctctttgtttcagaaactagagccctgtttattctgatcaaggctctggcccactgtctttatctcagataacccaccctcttctgcacacagcatggagctaagagaagggtgtctagttatgtaatatcatcggcagcataaattcccagaatttgttctttgatttttttgtttgtttttccagttagaaggtggaacttcatcattgtcctcttttcaggttgtctgtgcctattagttttctccagagggagaggtggcttgatttacatttaatctctgcaatttattagagtcctgtagttggatttactttgaagagagtttcccagaagaataaaatttgctgcgttgctttttgggtgtgagctgcttttgtatttgcctaatgcctttaatgcaaatttctttctttctctcttgcttttttttaaaaaaaatagaaatgtttgtcttcttaaaacatctgaaagtggcacaccaagttcctctactcctcaagaaaacaccatatctggatatagccttttaacctgcaaaagaactttacctggtaatgtgatttgataataatattacataaaatgtaacctatttcatgacttttaacagcaacagtgatgaaacaatcctcaaggtaacagaaacttgtgtaaatgtcgttcattgcttttcccatctgatatctttttgtgtttataattgacacagaaccctgccattctaaaatttacccgggagttgactttggaggagaagaattgaatgtgacttttgttaaaggagtgaatgtttgccaagagacttgcacaaagatgattcgctgtcagtttttcacttattctttactcccagaagactgtaaggaagagaagtaaaggaaattttatttttcaaagacagttgacatgaccatttcatattctctttccccctgtgaaggcttactctttctactgttcatttcatctaggtgtaagtgtttcttaagattatctatggatggttctccaactaggattgcgtatgggacacaagggagctctggttactctttgagattgtgtaacactggggacaactctggtgagtaacctcactttttcgtggacctgtcagggatgtctgtcatgttgatagtttgcttagtcttaaggaattatgtgtcttgttctccttggttagaagggactttgattcacttctaattccaaccattagcgtcaacgctctcttttcagtctgcacaacaaaaacaagcacacgcattgttggaggaacaaactcttcttggggagagtggccctggcaggtgagcctgcaggtgaagctgacagctcagaggcacctgtgtggagggtcactcataggacaccagtgggtcctcactgctgcccactgctttgatgggtaagtgttggatgcatctcatccagagtcttatcttggcttttcattttgaaggatctatgatcagctgcttcaccgccatgtgactttatgaatagagacgtgttaaagcggggatggtattcacaacatttaacttatagggtccaagcactgaccaacctgaccattagaacagagtgtggtctctgtacagggcagatggcgctgagtgggtattctccacagaaagagaaacgaagacagtaccccactcctccaacccaccacccaccaccaatcccaccaccaattccaccaccaatcctgccacccaccaccaatctcaccaccaatcccaccaccaatcctaccacccaccatcaatctcagcaccaatcccaccaccaatcccaccaccaatcccaccacctaccccaccaccaatcccgccacccacgaccaatcccaccaccgatcccgccaccaatcccaccaccaatcccaccacctaccccaccaccaatcccgccacccacgaccaatcccaccaccgatcccgccaccaaccaccaatcccaccaccaatcccaccaccaatccctgatgtgttcttcaaagacttatttgtcaggcccatagaaatgttacttcttgctctttgattcataaatatactaagtcataataatttttaaaagtgagagtttcgtactctgtatatttcaatgtatataatttgatctatttcaatttattggtcaaatagtagacatgttaggtaagtcttaaaatactgaggctttggagttagacagaacatggcttaagtgacagctttgctgcttattagaggtgtggccctagaagatttgtaaatccctctgagctttatttgatctaaaatatgaatagtaatagtcccgaatttgtaacgttgttgggaagattaagtgacacatttaaaatgcttagtactgtgtgtagaacataaacacttcaaaaaatgtaaactgtgatttctatattcaataagaaatgtagaaatggacaaagcatataaaaagcaaaagaaatactagaagacacttgatttttctcaaaaataaacacaccaagtatttttgttttagtgaaattcatgcttacatgctgtatactaggattgaacatactgccaccaaaatatagcagtcggtggtacatgtgggtggagcaagacccctccaccttgtcatcgtgtgaaggggctctgccatacatgaccttgcatgtgactttaaggtggttggcctggaagaaaagtcccaagatgggaaatagtaggtgtcttttttactaaatgcactccaatttgggaccaaaaattttcattcttgaaggctcagtattgtgagtttataagagataatagacataaaagtgtaatgatttcattgcaaataaaaaaaggcccctttgcacctgatatctccatcatttttctagaattttgtgcacacatgccttgcactacttggtgatgataaagatttccagatctttgcacagaataaggctttgctttagatcagaattttggatgtacttagtatacattcatcttttaaataatctatttacattttcatactttccaaaatacagatatattttattttatttatatatttatttaatttattttttgagatggagtctctctctgttgcccagagtagagtgcagtggcacaatcttggttcactgcagcctctgcctcccgggttcaagcgattctcctgcctcagcctcctgagtagctgggattacaggcgcgcgccacacctggctaatttttgtatttttagtagagacgaggtttcatcatgttggtcaggctggtctcgaactcctggcctcaagggatccacccacctcggcctcccgaagtgctgggattacaggtgtgggccactgtgcccagctgtatagagatattttaaacaacactaaagtcctcctactttgactaattagaagagcattagaagatcagcctgacttcttgacagttctgaatttagtggagcaatgaggttcagctttggtgaatgagcttaatttttccatgataaactgctagtttcttcccactacagtgtctctcaaaaatgggacagcaacattctttttgttttcacttgcagtaagcatgatgcaattacataaatgtacacttttcaatttgttaaatagaatcttcagagattcactactgccgctattggtgatgaaaaattaccagaaggaggaattaggtaggagaaaatgtgtcctatgtatttccttcccagttctttgaaagagagtgataggaaaaaggaacactattgaaggaaggactgcccagtttcaaacaggtatttatttttctctcctaggcttcccctgcaggatgtttggcgcatctatagtggcattttaaatctgtcagacattacaaaagatacacctttctcacaaataaaagagattattattcaccaaaactataaagtctcagaagggaatcatgatatcgccttgataaaactccaggctcctttgaattacactggtatgtagcatatgtaagaaggtggagagcagaattgcgctggttgatattttcatatcagtttgaacaagagggcagacctagagagactgtcgtcgttttctgactggtggagttgagggaaacgtgagggttgctgggaagtgaagaccccgcgacttgccgtgaaatctcttctacttaaagagcaagacatgtgaattaattctttcagggagggatacaactgcatgcaggtgatggaaataatgggcgtgggaaatgtctgtgccgtctgagaggcactgggcttgctttgacaagagtagcagaactgtcattgctttgggcttagggatattcgaatgtgtgagggcaagtgggatcagatatctacttccaggtataatttgggtaggaaagagactcatgcagaaagaagccctggaaggccagagcatcgtggtcagaggtgttgcctttggagggtcattgctgccaggagccgaatacccactgtatccaataacattcatggtcaggaatggtggctcacacctgtaatcccaacactttgggatgcccaggtgggaggattgcttgaggccaggagtttgagaccagcctgggcaacacagtgagaccccgtctctacataaaattagaaaaaaacaattaactgggtgtggtggtgtgcacctgtagtcccagctagtcaagaggctgagacaagaggatctcttgagcccaggagctcaaggctgtagtgagccaagatcgtgccactgcacacaaacaattatgtgacctcgggcaagttgctttacctctttacacctcttaatttccttatctgtaaaatgaggatgataatttcttcctgggtctgttgtaataattaatacatcaaagcacttcatgtctggaacagtgaagataccctgctatgactattaaggatagtatacatggaataagacacaggaacttctaaatgcttttgaccatagatttaggttctgagttttaagaatttaactcaggaaattgtaacaccaaaaatgtcatgtgaaaaatggtggtgacaaattttcttgaatcattagccttagaggttgggcagaaagcaaaaaattattcttgatgctactctatagaaagagaagacagaaaaagagaaagatgtatttttaaagtctatatccataactttatttgaccaaactctaatttaaaaattatgtttcagaattccaaaaaccaatatgcctaccttccaaaggtgacacaagcacaatttataccaactgttgggtaaccggatggggcttctcgaaggagaaaggtaagcatgacgctttaaatattgcttctagagtaagtctcacatgttgaaatacatggagtgggtcgttttaatcggtttctgtctgaaattatatctaaactctttatctttcctatctatttattcccaaatatttattcagttattcttaaaaaatgtatttttgctttggcttgaaaaaaaattttagggagacttttaagcatcttacttcattataaagatcagttgcttgactttgcatgaagcagattgggcccttctagggctgacaagcccgtgcaagaccacccgctcctcagtgttagtagcgttcccgtctcccaaaaccatgttctcccttgatgctaatggccgggagcacaggcaggtgtgtcgtctcactatggagaataatatttgtgtcattctttacagaagaaggtagcttgccaaactgtctccatctttcccgattcagtcttttgttcaagtaattcacatttttagattttttattggtaatctgagacaagaagaaatttaaagtaatcttcactaagccatgaaagctcccaacattgttctccatgagagatgctggcctgcatttattcaaaaacaaaagacccctctgttgccaaagctcggagggcttttcagaaacgatatagttgtaaattataattttgaatatataaagcaaaaaaatgaaaagtgagaacttccaggctttggattgttgtaggtgataaatataaaatgggatttctggggggctgctactgagatgaggggatggcagaaaacatggaagcaaggtctctggtcagcccagggtgctgggcttgtcccaacaccacgtaggcaataagaggacagtacagggtgccgtctctctccctcttcctctctctgtctctctctctctgtgtgtgtgtgtgtgtgtgtgtgtaacactaccttcccaatttttactgtctatttgtattcaaagataaggtccttatgaaaaatacactgctctgattcactttaaaacttatttccatatttattatttattgtgggaataataatattcccaatattattatttattatttaagttattattattaacttccctctgaggttatatattggttactcacaggtgaaatccaaaatattctacaaaaggtaaatattcctttggtaacaaatgaagaatgccagaaaagatatcaagattataaaataacccaacggatggtctgtgctggctataaagaagggggaaaagatgcttgtaaggtaactcatgagattatgaaaaacacaataggctgcttgagaaaattcatttcaaaatatattttccaatagcataattcaatcatagtttttaaaaaaattcagagacaaatgatctgataaattgataagcaacttttaacaaattgaatatacataatatatatttatattatttatgatatatgtcacaatctatgcatgtgctatttaagaggggcaaatatacatgcaataattgtgctagaatataaaaacattagacttcatcattgggatgatgatatcaagatttctttgttagatttatttcagatagaaaaggggatacgaaaaatgcaggcacatgagatacttggagaactttaagaaagagtgagtgtgtgtgtgtgtgtgtgtgtgtgtgtgtgtgtgtctggcaagcaaggtcttgcacacacacagcactttgggaggccaatgcaggtggatcacttgagcctaggaatttgagaccagtctgggcaatgtgatgaaacccatctctacaaaaaaatatgaaagtatctgtgtgtgtgtgttgctgtgtagtggactacagaactttagaggcagtcacttatttgaatcccattgtcgtaactttctactattttatttttccactgtgactcagggagattcaggtggtcccttagtttgcaaacacaatggaatgtggcgtttggtgggcatcaccagctggggtgaaggctgtgcccgcagggagcaacctggtgtctacaccaaagtcgctgagtacatggactggattttagagaaaacacagagcagtgatggaaaagctcagatgcagtcaccagcatgagaagcagtccagagtctaggcaatttttacaacctgagttcaagtcaaattctgagcctggggggtcctcatctgcaaagcatggagagtggcatcttctttgcatcctaaggacgaaaaacacagtgcactcagagctgctgaggacaatgtctggctgaagcccgctttcagcacgccgtaaccaggggctgacaatgcgaggtcgcaactgagatctccatgactgtgtgttgtgaaataaaatggtgaaagatcacgattagcaagtgttttcttctggttgtgaaacagaactgaaagtaagtggttgaggttccagcacagttcctgggatccctctaattgcactgcttcctctggaactcagtatatctcaaagatgtaatttcctctccgtgctgcacctggtcggccactgaaacccactattgcctgcttcacgtgtggcaaagagctagcgggcttgggttttgttctgccgagaggaagggagaacacccacttttataagaaagagatgggttacctgaacccatgggcacctttgcctcttggcctcctaactttgctaccagggcatggctaggagggtccaggctgcgcgtgctgaggagctcgaggggctgcagcattgcacagccttcatggcaggcaaggaatctgctttgcaaggggcattagccctggaggctcagtggatatgggctattgcaatagtaattcaaggagcatttttaggcctggcgtggtggctcacgcctgtaattccaacagtttaggagatcaaggcaggtggatcacttgagcataggagttcgagactagcctggccaatgtgacgaaaccccatctccacaaaaattagctgggcatggtggtgcgcacctgtaatcccagctcccccagaagctgaggcaggaggaccgcttgagcccggggatgtcgtggctgcagtgagctgagatggcaccactgcatcactgcattccagcctgggcaacagagtgagactgtctcaaaaaaaggaagcattgttaggtataaattattattattattattattagtagtagtagtagtagtagtagtactgagacggagtcttgctctgttgcccaggctggagtgcagtggtgcaatcttggctcactgcaatctctgcctcccgggttcacgccattctcctgcctcagcctccggagtagctgggactacaggcacccgccactgtgcttggctaattttttgtatttttagtagagacgggtttcaccatgttagccagaatggtctcgatctgctgaccttgtgatccacccgcctcggcctcccaaagtgctgggattacaggcttgagccaccacacccagccctgttaggtataaattatttcataaaattcagacttgtaaatttatggtagcctttggaatgggtgatagatgtcctatgccacacaaattcctcacatgccgaggctcaccgtaactgataccagctcgcttgattcagttcagttaaactgaacaacatttacacagaattggcgatttacaaaatcttatgtaagttaagtagaaaaacagaaaaaagttttctgaaagagtttgggtttttccttcaatgctcaagacagaggtccccaacctttttggcaccagggaccagttttgtggaagacagtttttccatggaccagcatggtggtgggggatgattctggaatgattcaagtgcatgacatttattatgcactttatttctattattactacattgtaatatataatgaaataattatgcaactcaccataatgtagaatcagtgggagctctgagcttgttttcctgcaactagacagtcccatctgagggtgatgggagacagtgacagatcatcaggcattagattctcataaggagcctagatccctcacatgtgcagttcataacagggtttgagctcctatgagagtctcatgctgctgcggatctggcaggaggcagagctcaggcggttatgcttgctggcctgccactcacctcctgctgtgcggcctggctgctaacaggccatggaccaggtactgttctgggccccgggggttgggaacccctgctcagagacacaccgggtggtaggaggagctaaaggtggagagggtgaaggaaaatatgaggtctgggctatccacaaaccagatagcaggaaactgaagagttaaacatttacttcagaattgaatggcttttgtaaaatctggctagattccatgaaacgattttaaaaatgcactatttaaattttgcctttgcatgcgatgaagacattagtctttgttcatgtggatgtttttttatgtttaaaagggaaaaaatggtttgcaatgaaacttttatctcagtctttgagtattgatcatggggtgttggaacaggactttggaatgcttgcagggtaaacctttggcctctgttagtcagggaatgacctagtttggcaaaacagaggagagttttgaaatatggaactttcccgaggcatacattgtcattttaaagtggtcaatcaaagcccagtaggactgggctggtgtcttggtgactcactgtgtgctcatatacaggggtaactgaggagcccttcacacaggtctagcctcgtgggactaaaaagtgtgacatgggctaggaaaatgcgaggctgggatgccttcactcccatgaggaagcgtgacgggaggaggcgtgggccactggcagttctacttcacaaaggctgctggcagtgtcaatcctgcaagctggccttgccctcctgtggcggcagtgtacacgtggcatgcaagcacatgcacaagccacctggctccaaggtcagccaagggctccaacatctgtctcagtccc

SEQ ID NO: 11 - RNA, 2472 nt, Mus musculus
  source 1..2472: mol_type = mRNA
agaccgccctcggtgccatattcagagggcttgaagaccatcttcatgtgaagactccctctcctccagaaccacaacgtgaccatccttccaggatgattttattcaaccgagtgggttattttgtttccttgtttgctaccgtctcctgtgggtgtatgactcaactgtataaaaataccttcttcagaggtggggatctagctgccatctacaccccagatgcccagtactgtcagaagatgtgcacttttcaccccaggtgcctgctgttcagctttctcgccgtgactccacccaaagagacaaataaacggtttggttgcttcatgaaagagagcattacagggactttgccaagaatacaccggacaggggccatttctggtcattctttaaagcagtgtggccatcaaataagtgcttgccaccgagacatatacaaaggacttgatatgagagggtccaactttaatatctctaagaccgacaatattgaagaatgccagaaactgtgcacaaataattttcactgccaatttttcacatatgctacaagtgcattttacagaccagagtaccggaagaagtgcctgctgaagcacagtgcaagcggaacacccaccagcataaagtcagcggacaacctggtgtctggattctcactgaagtcctgtgcgctttcggagataggttgccccatggatattttccagcactctgcctttgcagacctgaatgtaagccaggtcatcacccccgatgcctttgtgtgtcgcaccatctgcaccttccatcccaactgccttttcttcacgttctacacgaatgaatgggagacagaatcacagagaaatgtttgttttcttaagacgtctaaaagtggaagaccaagtccccctattcctcaagaaaacgctatatctggatatagtctcctcacctgcagaaaaactcgccctgaaccctgccattccaaaatttactctggagttgactttgaaggggaagaactgaatgtgaccttcgtgcaaggagcagatgtctgccaagagacttgtacaaagacaatccgctgccagttttttatttactccttactcccccaagactgcaaggaggaggggtgtaaatgttccttaaggttatccacagatggctccccaactaggatcacctatggcatgcaggggagctccggttattctctgagattgtgtaaacttgtggacagccctgactgtacaacaaaaataaatgcacgtattgtgggaggaacaaacgcttctttaggggagtggccatggcaggtcagcctgcaagtgaagctggtatctcagacccatttgtgtggagggtccatcattggtcgccaatgggtactgacagctgcccattgctttgatggaattccctatccagatgtgtggcgtatatatggcggaattcttagtctgtccgagattacgaaagaaacgccttcctcgagaataaaggagcttattattcatcaggaatacaaagtctcagaaggcaattatgatattgccttaataaagcttcagacgcccctgaattatactgaattccaaaaaccaatatgcctgccttccaaagctgacacaaatacaatttataccaactgttgggtgactggatggggctacacgaaggaacaaggtgaaacgcaaaatattctacaaaaggctactattcctttggtaccaaatgaagaatgccagaaaaaatacagagattatgttataaacaagcagatgatctgtgctggctacaaagaaggcggaacagacgcttgtaagggagattccggtggccccttagtctgtaaacacagtggacggtggcagttggtgggtatcaccagctggggtgaaggctgcgcccgcaaggaccaaccaggagtctacaccaaagtttctgagtacatggactggatattggagaagacacagagcagtgatgtaagagctctggagacatcttcagcctgaggaggctgggtaccaaggaggaagaacccagctggctttaccacctgccctcaaggcaaactagagctccaggattctcggctgtaaaatgttgataatggtgtctacctcacatccgtatcattggattgaaaattcaagtgtagatatagttgctgaagacagcgttttgctcaagtgtgtttcctgccttgagtcacaggagctccaatgggagcattacaaagatcaccaagcttgttaggaaagagaatgatcaaagggttttattaggtaatgaaatgtctagatgtgatgcaattgaaaaaaagaccccagattctagcacagtccttgggaccattctcatgtaactgttgactctggacctcagcagatctcagagttacctgtccacttctgacatttgtttattagagcctgatgctattctttcaagtggagcaaaaaaaaaaaaaaa

SEQ ID NO: 12 - RNA, 260 nt, Mus musculus
  source 1..260: mol_type = mRNA
gagtgtaaacactggagccaagcaaagaccgccctcggtgccatattcagaggggttgaagaacatcttcatgtgaagaatccctctcctccagaagcacaacgtgaccatccttccaggatgaatttattcgaccgagtgggttattttgtttccttgtttggtactgtctcctgtgggtgtatgagtggactgttaaataatacctctgcagaggtggggatctagttggcatctagacccctgaggacgagtagtga

SEQ ID NO: 13 - DNA, 30000 bp, Mus musculus
  source 1..30000: mol_type = genomic DNA
atgagaagttattttaaatttaattttttaaagtttatttattcaccccttgccacgctctccagtcgagtcagtttgacaagcagaagcttggaagctggccgtgaggaaaagagtttcatggaagctccctcctggagtctggcactctctttaatctctttaacccatacattaattttccactcccatgttagtctagtgtatggatccacgtgccctctattaagcattaccctattataagtgccatttaagattgaattctgacatagctaaagcctctcccagtgttccaagatcccagtttacagcaaggtagtttaacctattcagtaactaattaagcattacaatagacagagccattaactcagttgtctgcagaaagagcctgggaatctcactgagatagaaatctttactacaggctacattccatgccaagagcaagttgatatactatactgatatatggggaattcttcagacaagataagattttacaagacctaggaatttaggggtccatgacactacattattcttgaggcctgtcaagagttaaaaccccctggtgctattaacactaaagtgtgaaactcttgcctggcattagcctgatcctaggcagggctggtaatttctattgtaaacatttatctagttcctgcaaattcctttcttgcttgtatctggtaaatttcagtgtaccttgtcttattgtgatttgtagctcctgataattcgttgtaatataaaatagtctaatgttcgaccagagattacattcagattcaacacctctcttgtgtgcatctgtttgtcaatttaatcctaagctttgcccacctactctagagacccgttctacacagacacagggacccagagggtctgcagcaacctcttgcatggttatgtgtgcacacacagaagaagtataggtgtggtggtcaaaggacacttttagggggttgccttactccctccactgtgcaggttctggggatagaactccagtcattaggcttgacagtaaatgcctttgaccccctgagatatcctgcaagctccaccatgattttaggctttaaaaacatgcaaacctattagtcatttatctcttcaatagattctgggttagccaactgtgcagttagagttgaatgtgcaaggctgtttgaatctcgggtccatagaaaatagcctggcatcagggtccattgcaattacattgatgattgagtccctgggctcatgcttggatacccagttcaatggggccagtatcttatgatcgaggactggcttaaagtgcagatgttgaaatgagcctagaaactgagcctccagaggcaatgtccaaactcaagcccacgggcatgagtttgttcccaaatctacaattacagtcctggaaaagattctacgggggtagtagacccggtgactgggcctgaggttaacatcctggagcctgggtctgcagggtctggccggatactggaatttcctgggatgggcttgttttcagacccgtgaaaagtaatgtttacatcactcttcttcatgcatttggaacacatctccttgctgcgctgcttaggattggtaggagggtttcacggttaatgtgaaaagtctaacattcctcaatgcatattcactaggtccacattttcaaccggggttggggggtgcaacctatcatctggattccttaacaactcggaaggcatttttttttgtgcacagagaattgttcccatggattcttctgcaaagggacccattttggagcctccagctctgtcatcgtgtttatatgacttcttgaaattggtaacatattaagtagctgaacctggactgggatgtccgtggactatattgacaggttaaacagttgaaactgatgccagaaacccagtgtaaacactggagccaagcaaagaccgccctcggtgccatattcagagggcttgaagaccatcttcatgtgaagactccctctcctccagaaccacaacgtgaccatccttccaggtagctgctttctaccggtcttgttatttcctgtgtcttgggtttttttttttcaatataactatttctgcatgaacaaaagctcactggtataatgcactaatttcctgagtttttagaaaatctacaaggagttgtttttctttctatacaaatatattaatgtaaaatattttaaaaccaagaataagtttttgattcttttcaaagatgtcctttctgtgaaggttgtgggtgatattattgtccttattcataataattttgcattaatctggaaatttaataagtgtttttaattatttgtattaactctttacaaaattattagaaataaatcttcaaaattaacaataaatacactaatacacactgatagtaatctagaggtctcaatttggatcttgggaagcatgataaatattttaattttctatatacaaaatatcccacagccaaatcttccttctcctggtgattatgtgctgtgatttgcaacttagacatttatcaaaaaggtgaagtctacatgaagttaaattgtctattaaatacatggtaaacatgatctcaacctagtagttatatgtatatttttttctttcaaaggatgattttattcaaccgagtgggttattttgtttccttgtttgctaccgtctcctgtggtaagtattagtttaaggagttcaaattaatagtgtgtgagagaggaatggtcttgcaatctataccactcctggaggaagcctttaactgtacagctttgggggacaaggcagctgttgatactccaaggcaagaacttagatacattaccccaaacacagatgaacagggggaggaacttagagacatcactgcacctgttagcagaaatatctgttttgagtttactctttaacagagcctctcccacccccgcagagttgtttgtctttataatatcagccttctaaataaaaactctacctgaaaattggaaataatatcagatattgcataatgatttgagtctaatccaggtatctgattagtatatagtatttttaatataagacatacagagccatttctaaactgaaagtacctgctttgggtttcacaagtatagtatccctttggcagtctggagggacagctttcaacactcgatgtcagtgctctttccctgtttattcctttgcttttcaggatatgagcatggatggccctgaacagcccctctcaacagtcattatagagggagatttccctgggtataacatgtcaggtgtattctgagtcaaagctgacttagatatagccacacgcaaggattgttttcttcttctttttttttttttttttttttttttggttttttggttttttggtttttcaagacagggtttctctgtgtagccctggctgtcctggaactcactctgtagaccaggctggcctcgaactcagaaatccacctgcctctacctcctgagtgctgggattaaaggcgtgtgccaccacgcctggcaaggattgttttcttgactttcaagtatatggcaaagataggcttgtccttgtaagtagaagtcatttctctaggtaagctcttttttcccatccctctctgctccctacatctggcccatcatctgtaactgctctcctgtaccataactactgccatgttcaaaccaactaaacacgaatagtgataaccagagatgctatgggccatggctataaaattcataatcatgacaggaaaatgagacatgggaatacatataatacttgaaaacaaatactttatataatcctaaagtacaaaataatgatcgccaattttttctttagtctttcatatttttccgcatgaatctatctgttgtataaagtgttattcatgaataataattttaattaaaaattatgaacactaatgaaaaataattttaacttacctttggtatttatagctaatgttaatgcaaatgaacatttatgttatttgttcttcttcatggatattttgtaagtatggacattctctgcacatatccaattatttctatagattaaatttttggaaataaagattttagatagaggagtatgaatacctttgaaggctttatagcatgcattatggtattagcttctagacaggcattctctgtttggttttccccacaagcatgtggaagtgaattaacaatacaatctcttagaaatgagatgtcaatattaaatacgttttatgttaaaaaataaaatttacaggttcacaacactggtttaaacagctaggttaacaaagattaaatttgaaacaatcaatatttgtgcgctggctttgatcacaaatgaaagaaaatcaagcagtacagctttaatataaatgagtttaagagttcagaaatccatgtgcccagtgaatggcttctggagtacttagacactgcccaatgatggcacccgcacatagtgtgtctgcattgctttactgcattgtacgctgctgccttcatctcaggatgcacaatagcaaggcaggaccagcagcccaagtcgccttggaaacaaaagtaaatcggagccttttcctaagtctgagaacaagcctgttacagactagctctggtcaggtcattgtaccagctctgtgtgcagttctggctctggtctgattggctggagcatcaacagcagaagcatcacctccagcaacatatggaccaccacttgtagatggttcctcaggaggaaatctggatgccaattcagcaaggtggctctatgccaggctacaaagtaacagatgcctattggagctcactgttctaagtgggcaggcatggtgcaggaggagctgagagttctacatcttcatcaaaaggctgctagcagaatactgagttccaggcagataggatgagggtcttataggccacacccacagtgacacacctactcctacaagcacacctactcccacagggccacaccttctaatagtgtcactccctgagatgaacacatacaaaccatcacagtgcccatttgctgcaaagagaggcttcgttgatgtgggacagtcactacagttatctagggaaggtggtcatctcactgttagcagctttcatatacttacagttatttacactcctttggtaaattatcttttcatatctgacattgaatgtttaaaacattttagcatttatctatttttgtatctatgtctgcacacgcatgtgcacatatacacatgtgctgtggagcacgtgtggagatgaaggggcatcttgtggaggtcaagaggtcaatttgaaaactgaagggcctcattacaggttgtttaggttaaataaactctgtacaaataatgctgttgttataatcattaccaccaccttcgttatcattgctgccgttatcattgcaactgaggaggataagcagtcccacagttagaatgtgtctagtcactctttttcattgcctgagtcacatgttagtttaccaacattcaattgcaggatagaaacttccaggctatcagcggatcacagtttgtgtttgtgtttgtgtacgtctctgtgcaatgggatggcaagggagcctctgcttgataattatgagatgctaaccacataaaaaaacaagtctctttatagctatcctcaccactgggcctactattcagtgcattgtgcaaatgggacaccttagggtatacacttgggaacatatattcctaggagaatttacccaggaatatctgttctttccaaatataaacctgacttaagaggtaggcatggtgacacctctctgataagaagaaaaacaatattgctaggttggttcatccaaacttgtctcagtggcaggatccccatatagatagaacatagaaactcttacctctttagtgcttattaaaagacatgttgtctagacaaccattccttgaaaagtaaggacaatgtgggcaatgttgccactggagtattccataattaatgaaaacctgactggtgaaaacagacaggctgcctaaggtggaaagctaagtacaaagatttgaacggaatcttttcagggagatcccagttcttcaatggatttaaagagctgctctctaatgatatgtggggtgcaggatacccacatgatggagtcagcagaagcgatgtatctcagtttattttcaagttagcttactttaattttttttttaatttgaaaggtattagcctttttttctgatttattgaaaatattcttttctcatgccatatatcctgattatatattttccttccctctactcctccaagttcctccccagctcccatcttctccccatccactccctttctgcctctcattagataagaacaaggtttctaagagacaacacctatacagaacaacataaaatataataagatgaagcaaaaaccaccacagcaaagttggacaaggcaagtcaacagaaggagaagagcccccaagagaagggacaagagtcagagacccattcaggagtgccatgaaaattctcaggggaaggctacaaaatatacgtagaggaccctgtgcagatctgtgtaggccctggtgcttcagtctctgtttgctcacaggagccttacttagttggttcagaggaccttgttttcttggtgtcctctggcccctctagctctgagactccttctgtctcctctttcacagggatggatctctcagctctgagaggaaggatttgatgaagacataccactcagagctgtgtgtcctaaggactctgactctcccctctccgttctcctctctctactcttctccctctctctcccctcttctctttcttctctcctctctcatctctcctccctcccctccccactctgtaaaatgtctgagtgtgggtttctgcaaatacattttctttatcaagaaatgagcaacagaaaaacagtacccaatacttattattttgcttaaataaggctggctaaacatcaacatgcaacattgcatgttagaaaaaggggacagacaggattgagagtcagaaagagtaagtttatgtcccaggatatctattcactgtgtgatattagccacatttgaactctgagactcagttattgacttctttcatgaaaaaagggggaaaagagaggtgcaactaatggtcctgacctcaagttgccctccaagtgttgtcctaaaaagcattttgaaaaaaatgctgtattttcatttctaaggtgagatgttttcacagcatgttagacagcaggcagaaaaaaattatactgtattttagtagataatttatgtaaaaattattatataggtaataaaagagtcaacttctatgcataaatgttcataagatgactttaaatagcatgctgtattgtttgacagttgtcagacccgtgaagttgtaatgactattaggataaataaaacaggaatgtcaaaacagatgcatttctattaaaatggttacactttcccccaaaatcaacttttaaatcacagggtgtatgactcaactgtataaaaataccttcttcagaggtggggatctagctgccatctacaccccagatgcccagtactgtcagaagatgtgcacttttcaccccaggtgcctgctgttcagctttctcgccgtgactccacccaaagagacaaataaacggtaagatgtgatggtttgtcattgccaggttagatgttacttaaactgcttccagttatatgccaaaatagtgccatgtttctcagagtgttcaaagactctttgcatcagaagctcctaggctgggtcttttcaatgcagacccaaagtactgaacccagagacagactctaaacagccacaacacttgttcacagtgataggaggtagtgatgctacagccaaggcctgaagacagagcatgtgacaagaaagggtccttcctcacactgcaatacttagccttttttcactttcaacatgttattctgtccccacatgtacatctgttatgtatataaatgttattagctgggttatgcatatgagggagaacctgagggttttttttctttctgagattatatggcttcccttaatattaaaaatactaagtccatccattttcctacaatttttgtgatttcatttctcttcagcgcataatagcattgcattacatattttctgttttattcatttgtgtattaattaatttattataaatgctgcaaataaaacaatcacagaaccaaattaaccagactcagagactgtgcaactcagtgaacttctatccagttacagtaattgtttgaaaaggaagccagggaatgtcacaatgcacttgatactttcactatcaaatttatattttaatcatatatattgctttctaataaatggtgacaatttcacctgcatagagaaatatatttaattgctttactagctaccatatttatagggagcaaagttgagaaagtataagccaggaattttgttgataataaatttgagacccagtaggcaagtctcaatagtgcctgcagtggaccagtttacacttttagaatatgcattttctctctctctctctctctccctctctctctctccctctctctctctccctctctctctctctctctctctctctctctctctgtgtgtgtgtgtgtgtgtgtgtgtgtgtgtatgtgtgtgtgttttattaggtggtaattttggcaagaacaattattaaaaatatatttggaaattttaccttaattttctttcatttgatcaagagccaaatgtaaatttttgcttctttttccatacacataactttcatcttcaactatgtgaatttaagaattagaattttaaaactcattctctgatccctacatgctaatctgtaccaaaaaaaacccaaacaaacaaacaaacaaacaaaaaaacccagaccatatgtgagatttacatttttaaaaaaattgaaccaggttctaagattcttataaatagcaacgttaacatagcgttgatattgaagacagaaaaagcctcccattacatggacactaccgggaatcaatacaccagatgaacatcacatgcagacctaactcatagctgagtcagtttttttaaaagtaaattaaaatctttataacaataatcaccattttagaaaatgtggatgtttcagacaggagaatcgtaagtttaaagtcagcttgtgtaagttaacaagatcctttgtcaaagcaaactaagtaaaagcttggggtggcatggggggaggaaaaggctggtgataattattaggatttgattagcatatttgaagcccaggctctcctcctcagtaccacataaactaagaacaaaaccaatgatcttttggaaagaggagccagcgacgttcagaatgagaaaagaatcatcaacccttcagtgtggttggctctccgcacttgcagcgtaaacagtaagaaaaacaacgctatagagagcatggacttgtcgcaagaacgttctcttcagcaagtgacaaggccatgttattagtttcctgaccctgggctttatttattaacatgtacaaaatactgcatcatttcttaatgtgtgtttgttcaattccgcttttaaaatgtgtttttttaaaaaacaggtttggttgcttcatgaaagagagcattacagggactttgccaagaatacaccggacaggggccatttctggtcattctttaaagcagtgtggccatcaaataagtggtaagatgtggattttttttcccaactaaatttgagttaataacactcaaactcagagtagcttttgctgcaagtttatactatgatggacttttagacgagaccaccaagaaagataatagagctgaggcagcatcatggctgtaagaagggggtactttcaccttgataatgttcacatctttatcagttatagtgctcagccttaacgggcctctattacctatggtattcacacacaatgtaagatttgtgggaaatgaatatgcacccagataataggccttccctgtttccgcaacagactttttaggtaagactcggggacatctcatcccaaagtggattttggggtaattggtggtcacccccagaactgactttgccctctccatgtcaaagaacagctgaaaatgtctggagacagtttagattgttaaaattggggaaaatggtactttacggtaatgctcagagttggtgcagtcagactcagcagaaaacattctggccaccacggggccattgataagggattaagactgtggttctcagccttcctaatgctgcagctctttaatacagattctcttgtggtggaggttaccagctatacacttttcatcgccacctcataactgtaattttgctactctaataaatcatagttgtaaacatttgtgttttccaatggtcttaggcgacccctgtgaaagggtcttgcaacccctccaaaatgggttgtgacccacgggttgagcaatgccggtttaagaaatcttatttttgccactcggtccagactgaaagactgagttctgtccatcttgctaagcgtaatatttcttacaaggaatgtgaacgctaggatgttagagcgctttctctgtgactgctgttgcaactgatgtcttagaacacaccatcttaattctcagaccatcttaaaggcttaggataaagaaggcatttttataagatgacagggactgttagaaagtgaaagtgctaaaaaagaatgaggcggtgagttcgattatattgctttgtttttacgtccttcattccgtaggttcaaatttcaaatgttctcattttgctccagtaataataacagccctctcaccacataaacattcagtgtctgcagtttaaattttaggcaatgaatgaagaatgacaatggcttagctataaatccatatatttatatgtacatatatttaacctgaagtgaactacatcaagatcaatccataaactaacttgctgtatattgcttgatgaagtgtctaattactgtgaccaacgacaacattttaaaaaatagaactattgtgacttccccaaagctgcttagttgtctttttctccccctaactttgtaacttttttccaaatactttcaagaaagatcttcaagttaaaaagggatctcaaggagccagttttagtaaaaactattgagaggtgggcttaaagtgtacagataatcattaagaaaatattttatttgtttctaccttatcccaaccctcagctcatttcttttcttatctgaagcaaatttaaaagaaccttatttttacaatttacagtttcctaccctgtaaactgctgggagtttaggacccctacaccctaacataatgctttcctttttttttattggatagtttctttatttacatttcaaatgttataacctttcctggttccctcccccaccccaagtcccctatcccatccccctctctctgcttctattaggctactcccccacccacccacccactcccgcctccccacccaggcattctcctacactggggcatcaagccttcacaggaccaaaggcctttcctcccattgatgcctgacaaggccatcctctgctatatattcggctagagccatgggtccctccatgtgtactctttggttggtgatttagtccctgggagctctggggggtctggttggttgatattgttgttcttcctatggggttgcaaaccccttcagctcctttctattagtttgtatatgcatagtgtctcctgtgtttaattaatttcacaatttttagaaacttatagttatgtacaatagaatattgtttgtgctaacacacacacacacacacacacacacacacacactgcttgcttaactaagtatctaattaaaacaaaacgtaagagcttaatttggcttaatttctgttaaaagaatcaactattttcaatatataagataaattccagtaaaaggatgcttaaatagaattgaagaaacctttaaaaactggtgtgctagcacatggctatcatctcagtaccagggaagcagaggcaaagaacattttaagttcaaagccagtctggtctgaaattcgagattgccacattcagcatggcttgggggctggaaaactgagtaagaacattaagggaagaaaggacagacacacagacccatgtgcagggaagctggaatagtgtgagttatgagactgaacccctaacccccagaatgcttgttacatacacaggggaagggttaaatagtctcagagggcggtcaggcaatctctcctcttggtctataatcatcttggagtagaaggtgaagttgctggtcattgtgcacactggtcaattgctcctaaacactactgctgagacccagggatatctctgcccttttcccatgggtctgagccactgatccttcacatgtggtcctcagactacagaccacagacttcacctgctcctttcacatttactggggtttcccatggttaccacaggagttccaaaccagccaggctagaaaggacaaggaaggatgcagtggctgcggtggtggccagtggtggtggtggtggtggtcatagaacttaagagaggtttaaagcaagaagggaaatgatttcactgtgcgtataaataaattgagacagtctgttaaaagatttgacacaggcatcagtgttgtgactaatagtcacaaatagcaatcagacctgaataggcgaaggaagagaaactgatgcagatcatgattttgttttgttttgtttttttggttgtttgcattgttggtggtggttgttggtttgggtttttttttttgcgtatttgttttttgttttgtttttgacccagaagtcaaaggttcgccgtttgtcaaatactttgtgtctctggcacacactatcaggacccctgttgctgttgccttccttgcttatcagtgcctctgctagcttccatgtggaagtgcattgttttgtattgttgcatactcgttgcagtttaagaggcaaaataacctgtttttaatgctggggccaggtaaacacacccgaggtgagctaatgtccagcagtgtttgataatttagacatgcaaaaaacattttaattcctgtacttaccagggaagtcaccaaaatgggataccaaccttcaaaaatgactctgagggaagagcagtttatttgtgtctaaaaagaagtttggtcgaacgtctctgtgtttcctttcagcttgccaccgagacatatacaaaggacttgatatgagagggtccaactttaatatctctaagaccgacaatattgaagaatgccagaaactgtgcacaaataattttcactgccaatttttcacatatgctacaagtgcattttacagaccagagtaccggtgagtgaggcacagatccgagaggacactccagggatgtgttagcatgaaaaaaaaaatcttccctccagtcaaggtgcaaggggcatgcaatccccagccctgcccctattttattccttatttacatagttaatttcaatgtaatttcctcctaaaggtagcaaactccctgtagtcaactgataggctgtgtatgggcatagtgtcagacaatggtgtctgccactccattcgcagaagggaaaagcatctgttgattgatgttgcccaactgtgcccctctgtggttatcaattcgataacgaatattatccgcacgtctttgtgcgccccaacaaaggaagcataacaacatcttttgtgacatccaggaagaagtgcctgctgaagcacagtgcaagcggaacacccaccagcataaagtcagcggacaacctggtgtctggattctcactgaagtcctgtgcgctttcggagataggtaactagatgacgattattccactgtgattgcgatgccctaaacaagagtgccaagaaatacccacgtgccattcccagggacctggggaatatgatgcctttttatagatgtgattgcatggaaatacttggcaatcggaatgatgttgggttaccagaatatgcccctgcccaggctcaagggttcttatatgataaagagagaaacagaggggtcagtgtcagagtagaaagacttgaatggtctatattgctgcctttaaagatggaagaagagtccaaaagcaaagggtagcagaaattaaaaagggcacagaacaggtctccctgttaattatataaatatattatatttatcttccaaaggactataaaggcagaaaccacaacatgataattttgggaagccaaattcactcatatcctatttgggtgtgggcaaggcttgattttgcaatatacatccagcaggtgcctcagtcgtccaagcaagcaagcgtttcacacaaaatcggaacttagcaactagcctgttaaatctttgccccgttaccttgcaagaatagctgaggccgtggcatattttgtaacactcaggcaattttattttttgcccagctgtaccaggaagtggtccatcaatggacagggtacattcaatgtaagaacaacttcttcatggcttatatgagcttaaaggaacattttgtttttacaagccgagcagagtaaacgtatcctctaattatattgttcccaatcatcggaccttatgctgtgctgtagcgtggtagaaaatcacaggtcaatgtgcatgtgtggaagatacagagaacaaacagaggccttggtttagagcaacctgcccttgtggggtaactgacctagtccagtgagagcaggaacaggtattacccaattcacgtggaatgcaacttcacgactttgcactaggccatactgccaccttgggaagcaagcgtcaccaggatttttgctgcgggcaaagcacactccagccagaacagcacactgctgcaagggtgttttaaacacaggtttaaagacaaggtttttttttgttttgtttttgtttttttttttgtttttgttttttttctgcctcaagtgctgtccacagtctcaacaagtgaggtctgctagcattctgtctaaactccacccccacagttacctggcaacagccaggtaggctccttcctctcttaccctcttgggctctcccctactctccccccctccctactcccttccctcctctctccacatgctcatggctagactctacttctctactctcttcttctctctgcctttctctgcctctactactctcttaactctcccccccccccatgccctgaataaactctattctattctataccttctataccttcgtgtagctggtccccagggggaaaggctgccttggcatggacctgcagagatatccccttcccccacacttcaccatacccccatagaacatatcttaatatctctatatcttttttataatcacaacattggttaaaggcttgttttcagagtttaggcatggactttgaaagctttggagataatcatagttgccctgttaatggatcaatactatttacaattctaattaaaaggactcctcttttcctgttgtaggtttggcatttgccctgatctgtattttcatcttaggaggcagatgtcatgtcccataatcaccaggatccattgcttctccccaccttcccctctctctttttcccctcctatccctcctcctttgtaccccgtctccttctccctctccttcccctccctctctccccctcctcctctcttcctccccctttcccccttcccctctctcttcctccccctttccctctctccgtcccctcctcctccccctccgtctctcttttgtctttctccctcctttcttccttcttcctctttctgtagacacatgctctcaaggaaagggctggaaacactaggcaaaacaggagtcaggtctgataaacttaagccctgtgagcagaattttccagggagcttcttgacaaaccgagtgatgattgttgtctgggaacgagggacagtggctttggaggtgctccaaccattctgacatgttgattttcagcacatccatggggctgttttccaggtctctatggatctgagaaaggggcacaaatataaggcagttcaaccccacacagctcttgctgaaggtcagccatttgtttctatctcaggattagtctcaattgtgtgtccctttggttaatttctagggattaaaaaaaaagtgacttgactcattttactagtatttaacatagttataaaagaagacgaatgcaggctggtggtaacatttgcctttaatcccagtgttcaggaggtaaaggctgagttcaaggctagcccggtctacagagtgagttccagaacaaccagggctacacagagaaagcctatattgaaaacaaacaaacaaacaaacaaacaagatggattctgggcacttgtattctctcagcctcgctaacattctgtaacacttttaattaacagagtgacccacttagggttattgttgttgtgatgaaacaccataaccaaagcaactcagggaggaaaggtttagttcagtttatacttctggataacagtgaagaaagtccaggagggtgggacctcaaacagggcaagaacacggaggcaggagctgatgcagagggggtggaagaatgctgcttactgccttgctcatcatggcttgctcagcctgctttcttatagaacccaggaccaccagcctatggatggcactacctaccatggactgggcccaactctgatcactaattaagaaaatgccctataggcttgccttcagctggatcctatggaggcattgatgctccctcttctctgatgactctagcttctgtcaagttgacataaaaccagccaggtcatatagctaacaacctaacgttggagtggaaaatgtctttggaaagccagatgctcatcttgcctgggtcaggttctgcattttgtgtggaacaataggaagctggagtatagccaactagggcaaccatcttgacggaattcttagaagtaatggaaaatttagaaaccagtaaaggaagatgttaagtatattcaacttgaacagaagactgccttggcgtttggcgaagtctcctctgttctgaaaggctgtcattagggactgggtcagtacacaatcccgtagggttgttttagaaaggtaggactttgtagaaagtaattttttgaagtccctaacatcttcagcggtccagaaaagaagttgactttgtcacatggtggtgaactccttttcaactacaaatgtcccaggaaagttgtaaagtgacatgccagggatgtcttggagatacagttgtaggttggcatggttacctgaacattctcttccagtagcaaggctcttcatgatttttttttttaattcaagtggtagaatcagcttccaagactacacaagtgggatgtgagctctcttgatccaactgtcttgagtttgactggcctatcgttattcttaagtgtccattttattagtatggaatcaaattgattcttacatgctatcgaattgagcaactcatgtaaatagcataaataaaaatagatgaaaaataaaatgatataaggggggatgaaaatgaagcttttctgttctcatcgaagggcatgcttgttagccctttggaatttatgttaatgtcttttcattaaaatgcttctcacaatactcagaaacaaagcatgaaacagcatgttcccaaggcttagtcataatacaagggaaactcgagtcatctaatgtcctattagaaatgacagtgctgcttattctacagcacccagttgctgtctttcccagtagaacaacttttacttttttagcaaagaacaaactacaaattctgagataagttaacaggctttcctcctcttattgaaatggattctctctctctctctctctctctctctctctctctctctctctctctctctctcacacacacacacacacacacacacacacacacacacaatatatcctgatcccggtttccactcccattactcctcccacaacacctcccctccatttctatcattagaaaagaaacaggcttctaagtaataaaacaaggcaaaaatgaaacaagaaaacaaaaccgaacacattgaacttgaacaaattgaagaaacaaacgagagaaggcacaagattcagagagctacacacacgtccgcacactcaggaatccccattaaaaatagtcaagtggaagctatacccaggggacctcttgcagaccagtgcagccccagtgcatgctgcctcagtctctcaacgggcagtttttaacacagggtgctgattcccgccaatatcaattgtcataatcaccttagttactatgttgaaacaaacacaagcaaactcgggcattgtgtcactgaggaatgttcaccgctgagttcacaggttgccccatggatattttccagcactctgcctttgcagacctgaatgtaagccaggtcatcacccccgatgcctttgtgtgtcgcaccatctgcaccttccatcccaactgccttttcttcacgttctacacgaatgaatgggagacagaatcacagaggtgagtgtgagcggcgtgcgcccccttctagccctttccgttccttgcgagggtcttgctcgttgccctaacagcgctggagcctgtggtttaaccggatgcttttcagccaggtgcaggttacttcacagattaacaaattcttcccttccataaaacaagcctactatttagtcaaaccacagcggcagaggcagaagggagcaggaagcattctcactggcattaaggtttgggattggcttgggttacagctgctcatgcaaactgtcctttaatcttgtgagaaaccagagccctgcttatccagatctagggtctagtctgacctcttcatctttacacagcatttcctttatgtacgccgtggggcctgcagaaggatgtgtgtggacataataccatgggtagcataaatccaaaccaacagtcttttgatgccttctctttttcctttttctaattagaaggtggactttaatcctctgtcctcttttctggatgtctgtacctaccaggtattttttgccagagggagaggtgactctacttacatttaagccctgtgatatttttggagtcttgcagtctgactgactgaaaataatttctcagaagaataccatttatggagttgcttagagaggaaggaaggaaggaaggaaggaaggaaggaaggaaggaaggaaggaaggaaggaaggaaggaaagaaggaaggagagagagagagagagagagagagaaagagaaagagaaagaaagaaagaaagaaagaaagaaagaaagaaagaaagaaagaaagaaagaaaggaaggaaggaaggtaggtctgtctagtgcttctaatgctgtcttcttcttctttctcatttatttttaatagaaatgtttgttttcttaagacgtctaaaagtggaagaccaagtccccctattcctcaagaaaacgctatatctggatatagtctcctcacctgcagaaaaactcgccctggtaatgactcaatcttagtggcacatggcatgtgtccgggtttggttcttggttgcttgataaatactatgaccaaaagcaagttgggagagaaaggagtttgttttgttcacatgtcccagtcatagctgattcctgagggaagtcaggctagaaactcaagcagaagcagaggcagggactgggcagagaccatggagaaatgttgcttcttagcttgcttctgtgaatatatatatatatatatatatattcatgctacctgcccagaattgacactgacctggttagacggaccctcttccatccatcattaatccaaagaacatcccacagacatgcctataagttagtctgaggaagacgattctcagactgatggtccatcttttcaggtgactctattttgtatcaagttgacaaacactaacagccacatggtgcagcacatcttggggtcctctaagagttaatgaaatggttctcacgactctagaaactttgccaatgtgactcgtttcctgacttgtgatatatcctttgatatttgtgtatggtgcagaaccctgccattccaaaatttactctggagttgactttgaaggggaagaactgaatgtgaccttcgtgcaaggagcagatgtctgccaagagacttgtacaaagacaatccgctgccagttttttatttactccttactcccccaagactgcaaggaggaggggtaaggaaacctttctttgatgatcagcaaggtaattgttttctagttttctccctgtgtgggggtttaattttagactgttcatttatttccaggtgtaaatgttccttaaggttatccacagatggctccccaactaggatcacctatggcatgcaggggagctccggttattctctgagattgtgtaaacttgtggacagccctggtgagtgaggttcgtttgttacggaactgcatggctggcttggctgttgtgattaatgtcttggtcttatgtgatgggattgtttatatggtttctgttatggtttgtatatgggagtggcactatcagaaggtgtgaccctgttggagtaggtgtgtcactgtgggtgtgggctttaagaccctcatcctagctgtctggaagtcagtattctgctagcagccttcagattaaggtgtagaattctcagctcctcctgaaccaagtctgcctgcatgctgccatgttcccaccttgatgatagtggactgaacctctgaaacctgtaagccagccccaattaaaacttgtccttggtcatggtgtctgttcacagccgtgaaaccctaactaagacagtttccttggataaagggaaagaatgcttatctgtgtctaatcctgccacatctcaacacttttcagactgtacaacaaaaataaatgcacgtattgtgggaggaacaaacgcttctttaggggagtggccatggcaggtcagcctgcaagtgaagctggtatctcagacccatttgtgtggagggtccatcattggtcgccaatgggtactgacagctgcccattgctttgatgggtaagtttcagggtcatcttattataccaatgtgtgtgtgtgtgtgtgtgtgtgtgtgtgtgtgtgtgtgtgtgtgtgtgtgcatgtagaggttaatctcgggtatctacttgtactgcttgttcatcttatttgttgagatagggtaattcactgaacctagtgctaacctttttgactagacagataggtatctgcctgtctctgtctcctggtacatccttagccctagttctgggttggggatctgaacttgaatcctcaggtttgagaaccaagccctttgcccactctgccatctccttggccctgagatatttgtttttaggacaagaaaagtttcaaagtccttgcctagaaaatattataattttaaattcagcctgtatatcctttacgtggttaatttaaaattcaaaggaaaggtaggtagatttttaagcaacaaaatacctttaattcctgctggggcttattttaatcagtacagctacatgaaggctcggataatgagagcaactgtttttggggttggtagactgaacctgattctcccaaaggttcttcaaaaggcacagaagcactcctgtgctcttacttgaaataaacagaaagtaatttttaagtacgtcttgagtgtttccagccacagcgtttatactgtgaactgtaatcctttaggaacacagtgcaacagaatatgagcgtcttccaagattttagcaacagtaaagggtccctgaagggacactgataaaaatgaatccacaataaaaagtatgacaaacccgaggcattctgagagccctctcctgtgctgtgtctgaggattcctctgcagcctttgttcctgacacacaacatcatgcttactgtgcactgtgcatatcgccaggctgcgtagtaccagcagatggtaccctaaacccaatcaatcagactgaggattctttaatggtgtgaaactggtgtgtgtggtatgtgtgccttaggatttctgctcttacaggaacataacagtataattttaaacaatttaaaaaaaaacattaagatgtctcttgtcacagtgtgtctttggattgtacagtgttaaactctgattttcagtgttgctccagctggttagttgagtttcataaaaactcattgaatgaacttgggcttggatattagagtttccaaaactttctaaaccgtccttaatctaagactatcatttggttctccacatttatgtgaagtggtgcttctcagctttatcagttataaaagtaaaaaattaaggaactcctaaaaacattgaggttgttcttcgtcttttagtatgaaatacttagacatgttttaattatttatgtggaaataaacaagcccattattctattaatatgagcgtttgctaataagtggtaaaaattctccatacatcaaaaattgtcttgcagtaaatttctttataatatattaccagtaaatgtttaatatgtgtacctgcttcatatagtcacacacagagacataaaaataaaatcttttcaggcaaaagggagtcttaaatggaagaaagttttattacaaactaaatcttcaaagtccaatacgactgctgtaagcaatgacaggttgccttgccaggaaaaggtgactaggtcatatggaatgttgtctttcttttctctccaccccttcaagaaaatgtgctaagaaaaaggagcggaggaaggatgccaacgttactttgtttccctcctagaattccctatccagatgtgtggcgtatatatggcggaattcttagtctgtccgagattacgaaagaaacgccttcctcgagaataaaggagcttattattcatcaggaatacaaagtctcagaaggcaattatgatattgccttaataaagcttcagacgcccctgaattatactggtatgcagcatatttaagaggaacctgcacaactcaatggtattggtgtcaatttccacttcagtttgcatgagaagagagatctgcagcaattgtctttgtgtcctggttggtgaggctgagggagagatgaggccacctgggcagtagaaatcccgtgtcttcccatacattcactgctatctgaggggcaaaaaagcttcattactttctcagagtggcatgcaactgagtgtatggtattggtctaggaaagattttgacatctggggacattgggcatcttctgacaagattggcagaatgactatggcttaggaatatacaaccatatgaaagtgaacgggactagatgttagtgcccaagaataccctggttgacaatggggggacacggagcatggagctgctttggaggcacatcactccacaggaatggaatgtctgccaacaccattacctgcaagtgtctgtgaacagtcatgagaccttagacagcttggctttcctccttccacctctaatatctgctgcacgcgtgctgatctccgtgttgcttccttgcaatcattaagcaacgtattcaaataaagccctgggagagtatggctatttttgctctgtttctgaattctgctacagtgtatattaaacaagacataagaaagtagacatatgtttgccaataaattttggttgaagagtccctcttccccatagaaatttcgttccaaaatgccatacagaatgtgagaattgtcttgaattgtgggctttagaaattgctcagaaagctggagggtcgttctttttagttttagtaatgggtttcattatatttcatacatatgcatagtatgatgtaattgtattcacatccttcactctctcttgtcattttcactcctgcagttctccctgctcctcccaagtagtcccagactggtcattcttgctttgttgctttgtagaaaaagaataagagaaaaagatagatactaatttttgaagttcccatctatggtttcaattagtccaaatctattcatgaaattttctttcagaattccaaaaaccaatatgcctgccttccaaagctgacacaaatacaatttataccaactgttgggtgactggatggggctacacgaaggaacaaggtacagtatggcatgtgaaatgttcctgtcttacatgctaaagtacatagagtagatccactcaacaagccttactcatgacctttctgttcattccaaactattggtcctctgattcccaagaatgtgaatttttttacattaaacatcaatgagctaatcctttaagaatattactcataatagagattatttttatgagtctgcattaagaactgtggccctatgatactatcaagtccactgaatcccatgtggtcctcagtacttactgtgtccctgtttgctaagttctcccttggtatcaatagctaaggtgccagcatctctcttgaagaacagttcttaatatttatttaaatgccttcttgtaaaaaatctgacatttcctctaattatgccattaaatccttatgtaaaatacatagattcataaagagagaaaagtagattgcagtacagttaccaacatttgttaatagaattttacatagtgatgatcatatttgattattagtgtactcagttgcaaattgttttaaaatctaccataatgttgaagtagttatgggcataaacaacattttcctttctgtcgtaactacaattcaaagtatctgtgacccttacactacagtgctgccaacaatatcacattcctgcattagttatctgaacttaaaactgaagggcgtctgcagctttatttgaaaggttgagaatatagaggcgagtttttcgctttcccttccgctgagtgtatggatgcctcgattgtgtggctctgaactcaagacccctgtgtgctgagacttgagctatttctctagaaataagaatgctttctttctagactgagtgccagataaccagcattagacatatttgagtgattttttttaaaggagatgattggctgtgtcttctttatatttcctgaaccagtcagtactgtattcaattagttcccattttccactacatttacttggctacctatatgtggacacacacatatatacatgcatatacatacatacatacatacaaacatacatacaaacatctgagaaatatagacatgggtagacattaagttatctgtaaatgtatcatttattgcagaacaaaatactactctgctgtcagatgtttgggatgtattctcataaattgtacattttattataatttgaatttctaaaacaatgaaaggcaagaacatcctttaaaggtacaaatgtgtgagacaacattttttgaggggggcatcggttgatataggaggatgcctgagatcatagaaacaagtctgcagaggcttgggtgctagcgagtctgaaatatgtcactagaaggaaggcagcacggatcactgctccttcatctccttctcccccttctccttctccctctcccggtctctcttctccctccacctcttgcttcccttctccctccctttccctctgccctatttattgaacttcctctccttaaaggcacttcttgattgcttcataggtgaaacgcaaaatattctacaaaaggctactattcctttggtaccaaatgaagaatgccagaaaaaatacagagattatgttataaacaagcagatgatctgtgctggctacaaagaaggcggaacagacgcttgtaaggtaatggggaaaaaatacacaatagttccatgaagacagttcattcaaaaacgaatctccaaagttatatttcattagttttggttctgaagttccagagttaaacgatttgaaggctatttgaaacgatagcctttaacaaattaaacacacatagtgcatattatatgttacttataatagttatgctagaatatgtattgctgtgacaggtatgtcacagtgaggacaggggcatgccaaatttaaggacaatttttacatgccatggtcatgctaaaatacaagaaaagtagatttatttgaacttggagtaaagatgctaagtctgttgggtttatctgagaatgggagagggaataaattggccttgtaaccattcacttattttttttttcatggctaatgggatgcacagaaattgagaggctccgtggtggtgtgtaaagtgtgactgccaaatattaaagacatctgtctatgagcaaggggctccttatttgcatcatcaccattacccctctctacctttgtatttctctaccctctgtgacccagggagattccggtggccccttagtctgtaaacacagtggacggtggcagttggtgggtatcaccagctggggtgaaggctgcgcccgcaaggaccaaccaggagtctacaccaaagtttctgagtacatggactggatattggagaagacacagagcagtgatgtaagagctctggagacatcttcagcctgaggaggctgggtaccaaggaggaagaacccagctggctttaccacctgccctcaaggcaaactagagctccaggattctcggctgtaaaatgttgataatggtgtctacctcacatccgtatcattggattgaaaattcaagtgtagatatagttgctgaagacagcgttttgctcaagtgtgtttcctgccttgagtcacaggagctccaatgggagcattacaaagatcaccaagcttgttaggaaagagaatgatcaaagggttttattaggtaatgaaatgtctagatgtgatgcaattgaaaaaaagaccccagattctagcacagtccttgggaccattctcatgtaactgttgactctggacctcagcagatctcagagttacctgtccacttctgacatttgtttattagagcctgatgctattctttcaagtggagcaaaaaaaaaaaaaaaaaaaaaaaaaaaaaaaaaaaaaaaaaaaaaaaaaactgagaaagaggtagaaatctttgtaacatttcatttagaataaaaagagtctctacttgaacctgatgggacatctaaaccacctttctggccattgctgcagagttctgcatggtcatgactgcatgaggtttcctacccctggagcagagccatctgggcatgagggttgcttgtataaacttcatgttcctccctcaggaaataacctctctgcctaggttattgaggaatatcctctctgccaggacagcccttaagactgtgggaaagaactcttaaaacataagttcaagaatatataatttctcagctatgtaaaatataaggatacaatatgaattgtataaggagattcgattcgtggacctaaaagaacaaaggcagctgcactatgagccagcttgtcagaaagatactactgaaggagataaagagataaagagatttagggagtggtgataacagggcaagatcccagccagctaagtttattatttgtgcttacataggcaggcagagtcctgagttcaagatcagcctgggacagagctagtttagacccagggttggtgggaatcccacccagctagcttgttgtctatgctaagaaagacaggcagatctctgaattcatttggcatgttttttttttttaaaaaaagtacctgatgtcttttcttaagaatcaagaggctagagtcatggaatgctgactcatgggttaaacaaaagggaatctagagtaagtgactgagttgatatgtaaataaaagactgggctttagtctgcaagagctgagctacctggatgagctgtctggagatctctgtagagcagaatactagtctctaatttttttagattttttttttttctagtagctactcagagagaactgcttagagaatgaaatgaacattgctattttagttgtgttgttttgtttttttttttttctagaaaatccaaaaatattttatagaagcttctctgactctagtcagaaaacccatgagctagccagagagcttttggatttttttttcctagcaagagaaagctgtctcaagaagagacagctgtctcaagcaaaagagctgccttgagcagaaagctatctctatcagactgcatagccaagagctatctgcagaaagctgtccagctgtctagactacaaggctgtcagcttgcaacccatcatatgactttgagttgtttctttcaccgctcccagacaccccttctcgcaggaacctccctccaagccaaggctggtcctgggcaccttgccacatggtcttggctacagatgtgtgcaagacctgtaaggctatatttttcttcttgtgtgcagctcctgcaataggcctatcacacagtactcacacagggcaagggatctgatgagaacctcctggggaaccctcggggttcagctgatgctgtattctgcaatagtaattcatgtaatgtcattgggtgtaaagtgttgtataaaattcaagcttccaattgagttgaaagtgaaaagcaatcttggaatggatgacattaatcctcatgcaagacaaatttccagcttcccattgattcataaagtgggtcatctgtgcttaactccatttagttaacctggttaatatttagacagaattagccatttacgaactactgtgcaagttaaacagacaaatagaaaagtgaaatttcctaaagaagattaaacttttccttgcatatataaaggcttgttgagtagtgcagagggttaaatatggaagatcctgtgggttatctacagagttcaccatgggaagtgtaagaggtggaagcaaatggctttggaaaaatcttccaagcacacaacttcaacttttaattttgtacaccatttcatcttaatctgtgtggcagttgttttatatttaaaaagaaagaagtggttctcaatgaaaatcttgtatctcaaggtttcatattaataaccctaacaggtatttacacaaggtgtcacagtacttactgggtaaactttgggctttggtttctcaaggaatggcctcatttgagcaaaacagagttttgaaatgagggatttccctatggcgtaaagtaccatgatcacgttgccagctggagtccagctgggctggaatgctctgcttttcattgtgtgttcctgcacaaagtagcccgtcttccactcgaagccttaagaggctgagaaaatgagagggccggataacatcacttttacaagacaaagtggaggcaggaggccctagatctttggcaggtccatccaagaaagggagtgtcacctctggaatggaacaatgccggcactgttcttcctgggccgcacgtggagagcacacagcacaccactaacacttctagagctcaacgggaagctcaaagggctgtctgatctctatctattttttttcttgtagttcttgcttatggctaccagccctacaaactgtcaacaactctgaaggatgctcttgcatctctgcctctctctttcatcagtacttcatgtgaataggaatgtggcaaataggagagatttgggtttgctgttattatttttgttgctgtg

SEQ ID NO: 14 - RNA, 2513 nt, Rattus norvegicus
  source 1..2513: mol_type = mRNA
tgaagactagcttcatgtgaagactccttctcctccagcagcacaaagcaaccatccttccaggatgattttattcaaacaagtgggttattttgtttccttgttcgctacagtttcctgtgggtgtctgtcacaactgtatgcaaataccttcttcagaggtggggatctggctgccatctacaccccggatgcccagcactgtcagaagatgtgcacgtttcaccccaggtgcctgctcttcagcttccttgccgtgagtccaaccaaggagacagataaaaggtttgggtgcttcatgaaagagagcattacagggactttgccaagaatacaccggacaggggccatttctggtcattctttaaaacagtgtggccatcaattaagtgcttgccaccaagacatatacgaaggactggatatgagagggtccaactttaatatatctaagaccgacagtattgaagaatgccagaaactgtgcacaaataatattcactgccaatttttcacatatgctacaaaagcatttcacagaccagagtacaggaagagttgcctgctgaagcgcagttcaagtggaacgcccaccagtataaagccagtggacaacctggtgtctggattctcactgaagtcctgtgctctctcagagatcggttgccccatggatattttccagcactttgcctttgcagacctgaatgtaagccatgtcgtcacccccgatgccttcgtgtgtcgcaccgtttgcaccttccatcccaactgcctcttcttcacattctacacgaatgagtgggagacggaatcacagaggaatgtttgttttcttaagacatctaaaagtggaagaccaagtccccctattattcaagaaaatgctgtatctggatacagtctcttcacctgcagaaaagctcgccctgaaccctgccatttcaagatttactctggagttgccttcgaaggggaagaactgaacgcgaccttcgtgcagggagcagatgcgtgccaagagacttgtacaaagaccatccgctgtcagttttttacttactcattgcttccccaagactgcaaggcagaggggtgtaaatgttccttaaggttatccacggatggctctccaactaggatcacctatgaggcacaggggagctctggttattctctgagactgtgtaaagttgtggagagctctgactgtacgacaaaaataaatgcacgtattgtgggaggaacaaactcttctttaggagagtggccatggcaggtcagcctgcaagtaaagttggtttctcagaatcatatgtgtggagggtccatcattggacgccaatggatactgacggctgcccattgctttgatgggattccctatccagacgtgtggcgtatatatggcgggattcttaatctgtcagagattacaaacaaaacgcctttctcaagtataaaggagcttattattcatcagaaatacaaaatgtcagaaggcagttacgatattgccttaataaagcttcagacaccgttgaattatactgaattccaaaaaccaatatgcctgccttccaaagctgacacaaatacaatttataccaactgctgggtgactggatggggctacacaaaggaacgaggtgagacccaaaatattctacaaaaggcaactattcccttggtaccaaatgaagaatgccagaaaaaatatagagattatgttataaccaagcagatgatctgtgctggctacaaagaaggtggaatagatgcttgtaagggagattccggtggccccttagtttgcaaacatagtggaaggtggcagttggtgggtatcaccagctggggcgaaggctgtgcccgcaaggagcaaccaggagtctacaccaaagttgctgagtacattgactggatattggagaagatacagagcagcaaggaaagagctctggagacatctccagcatgaggaggctgggtactgatggggaagagcccagctggcaccagctttaccacctgccctcaagtcctactagagctccagagttctcttctgcaaaatgtcgatagtggtgtctacctcgcatccttaccataggattaaaagtccaaatgtagacacagttgctaaagacagcgccatgctcaagcgtgcttcctgccttgagcaacaggaacgccaatgagaactatccaaagattaccaagcctgtttggaaataaaatggtcaaaggatttttattaggtagtgaaattaggtagttgtccttggaaccattctcatgtaactgttgactctggacctcagcagatcacagttaccttctgtccacttctgacatttgtgtactggaacctgatgctgttcttccacttggagcaaagaactgagaaacctggttctatccattgggaaaaagagatctttgtaacatttcctttacaataaaaagatgttctacttggacttgaaaaaaaaaaaaaaaaaaaaaaaaaa

SEQ ID NO: 15 - DNA, 30000 bp, Rattus norvegicus
  source 1..30000: mol_type = genomic DNA
attcctccagcccctgtatcacgtcaaactcgaaactccagctccaggactagctgcaggcattgatgcttctgcgctgtttccattctgtgatcatgtcttctccatacctacctctaagttttccatgaggtctcaaagtaaaagctttaagaagaaaaaaaaagtgttgtccagcaggtttcagtaagctttgctggagaggaccagataataaaatcttagtttgcttgtttgttttgttgttgttactgaagaccgttctataatcataggaagtaggcaggcatacatcgtgcagcagtgaatggacatggttgtgttccattaaaacttcagctagaaggacaaatcccaagcaagatttgttctgtaaacagtggattattaactcagtactgggtggatctgaacatgaacttccagtgtaataaaaaggtagaaaagcagaagtgtgaagaatcccgagagctcaggggagaccactgcttctgctcacattcctggcccaagaggactccccctggagacctctggacacaagaaccgaggagcagtctggttcctgcctgtacccagaactgacactgtaacacatctacacagtggagtattactcagctattaaaaacaatgacttcatgaaatttataggcaaatggatggaagtagaaaatatcgtgagtgaggtcacccaatcacaaaagacccacacggtatgccctcactgataagtggatattagcccaaaagctcggattacccaagatacaatccacagaccacaggaagctcaagaagaaggaccaccaaagatgcagatgcttcagtccttcttagaagggggacaaaaatattcataggagaagataaggagacaaagtttggagcagagactcaatgaatggtcattcagagctgccccacctggtgatccagcccacatgcatacagccaccaaacccagacagtatttctcatgccaagaaatgcatgctgacaggagcctgatatagttgtctccagagagactttgccagctcatgacaaaaacagaagagaatgtttgcagccaatcattgaactgaaaccagggtccctgttggaggagttagtgaaaagattgatgcaaccccgtaagaacaacaataccaaccaaccagagctcccagggactaaactaacttccaaagagtactcatgaacaggccaatgtctccagctgtatgtatgtagcacaggatggcctttctgggcaccagaggaagaagcccctggtcctgccaaggctggaccctcccccagtgtaggggaatgtcaagatggagaggtgggaagaggtaggtttttgggttgggaaaaggtgataacatttgaaatgtaaattttaaaaatccaatttaaaaaaggtagaaaaccaataccttgctttgattctcctataggagctgtctaccccacccccacattgaggtgtgcctccaggaaatttcaatagaagtatacacacacacacacacacacacacacacacacacacacacacacacacttgtaaaggcaaataggtaagaatcaagctgttagtccccaaataaagagatatgaccattttcaaaatgggagacctatgcctgaattgtgtgtccctagtataaagcacttctctttcttcagcataagcacttaaacgcatttcccatgtataatttatttaaaatgggttcttgatatgcttgtaatataatgatatcttggtatacatgaacactgtaacattatttccactctaaagttacttaacacagtcaccatctcagacaattattatgtatgttacgaatacctgcataccagggtacagtgtgtacacctataatccagcactctgaagatctagattcagtggttctcaacctggggagaggggtcacatatcagatatttacaattcataaaagcagcaaaattacaattatgacgtagcaacaaaatacctttatggttggggatcactatacatgaggaactatattaagtcgcagcttagaaaggttgagaactactgctctataggatgcaaagacagctcaggggtgctcttgaagagaacccaagctcagttcccagcaaccacatcaggtggctcacaaggacctgtgtctccagctccaggggacctgattccctctgtcggtctgcaacgtgcatgcatttgcagtgaaagagacacatcattagaaataaaataaatggttaaaatttaactaatgttgctattgctgggcatgggatcttgcagtctattagttctaaaagctgaaattttgtatcctttcacaaacaccacccatgacaccaagtttcagatcctgacactcaccatcccacttgtttctagggcttgcctttttcaaatgccacatgtaagtatagctcttcaaatggccatatgtttttatatctccaccagttttgcatcactgcaatccaataccttgagcccctatgtcgaatttataatctgcccatcagttgactttaatttatttagggttgcttataagttcctaatttttttcttttggtgattttgtttttcttttctgattatttgtgatcttctggctttgtgttggtgtttgcacttttagataagaggctattttaaatttaatttttaaaaatttatttattcacccattgcaaggctatgtgtgtgtgttctgtgcaggttctggggattggactcaggtcatcaggcttgatggcaaatgcttttgacctactgagatgtcttgtaagctccacgatgattttagacttttaaagcttgcttcactgggcaaacctagtagtcatgtatctcatcaatggattctgggttagccaactgtgtagttagagttggatatgcaaggctaggtttgaatcttgggtccacagaaaagagcattgcatcagggtccaccgtgattacattgatgactgaattcctagagcccatgcttgaatcctcagatcagtggggccacgatcttatgattgaggactgccttaacatgttgatattgaaatgaacctgaaaactgagcctccagtggccatgttaacgaactcaagcccgtgggcatgggtttgttcctgaatctacaatcgctgtcctggaaatgagccctggaaatgggacaatctggtggctggcctgaggtatcatcctggagcctgggtctgcagggtcagcctgataactgggatttcctggaatggacttgtttacatctgtctttattcatagggaacacatcgccattctgtgctgcccaggcttagtagcagggttttatggttaaagtgaaggatcgaacactcttcaatgcctattcactatgtccacagtttcaccgggggctgtaacctatcatctggctttcttaacacttggaaaggcatggggaattgttcccatggattcttctgcaaagggatgcgtggtggagattccaattttgtcatggtgtttacatgactttctggaatcggtaacatattaagtacttgaacctggactggaaggtccatggactgtattgacaggtcaaacagaagacactgatgccagaagcccagtgtcaacactggagccaagcagagaccaacctcagtgccatattcggagagcttgaagactagcttcatgtgaagactccttctcctccagcagcacaaagcaaccatccttccaggtagctactctccaccattctcattgtagcctatgtcttaggaatttatttttttaaaaaagtataactatatctgcatgaaaaagtctattggtgtaatgcactaatttcctgagggtttagaaaatctacaaggaattgtttttctttgtacagctatattaatgtaaaatattttaaagccaaggataagcttttgattcttttcaaagatgctctttatgtgggggttgtgggtgatattattgtactcattcataataattttgcataaatctagaaatttaataagtgtttaattatttgtatcaactctctttacaaaattaatagaaataattcttcaaaattaacaataaatacactaatacacactaattgtagtctagaggtctcaatttgtatcttggggagcatgataaatattttaattttctatatccaaaatgtcccctcctccaaatcctctttctcctggtgattatgtgttgtgatttgcaatttagacatttaccaaaaaggtgaagtgtacattaaattaaattgtctattaaatacatggtaaacatgatctcaacctagtagtagctaaatttatttttttctttcaaaggatgattttattcaaacaagtgggttattttgtttccttgttcgctacagtttcctgtggtaagtattagcctgggagttcaaattaagttagtgtgtgaaactataccactcctggagaaagcctttaaaagctttggggaagaaggcagctgctgatagtccaaggcaagaacctctccttagatacattactcctgacacagaacggggtggggggggaacttagaagcttcaatgcttctgctagcagaaatttctgtatcaagatttctctctagcagagtcctcccaccccaaagatttgcttgtgtttattaccagccctctaaataaaaactctacctgaaaatcggaaagaatatcagatattgcataatgattgagtccaatccaagcttctgattagtatatggtatttttaatataaggcatagagagccatttctgaactgaaaacacctgctttggatttaatgagtgtagtaaccctttggtagtgtggatggacagctttaacactagatgtcagtgttctttctctgtgaattccattacggttcagaatgtgagcatggccctggacacccccttctcaatagtcattatagagtgagatttccctgggcatatcatagtattccgatcaaagctgactttgtctagccacacctcaagggctgatcttgactctcaagtatttggcaaagatgagcttatccttgtcaatagaagccatttctctgggtaaactcattgttttccctctctgctccctccatctggcccatcaactgtaactgcttttctgtgccacaactactgccatgatcaaaccaattaaacacgagcagtggtagtcagagatgctatgggccatggctataaaatttacgatcatgacaggaacgtgagacatggaaatacatttaatacttgagaacaagtactttacatagtcctaaagtacaaaataatgattgcttgcttttctttagtctttcttatttttctgcatgaatctgttgtataaaagtgttattcgtgaataataattttaatgagaaattatgactattaatgacaaatcatttttgacttacctttgctatttatagctaatgttaacacaaacaagcacttttgtcattcgttcttcttcacgctattctgtatgcatgtgacattctatgcacacattcaattatttctactgattcaaattttagaaataaaaatttttagatacaaacatgtgaatacctttgaaggttttatggcatgcattatggtattagcttccagaaaggcatcctctgtttggttttccctacgagcatgtgggagtgttcaaccatcccagttagagtgagccctaacaggcatctgttactttgtagtctggcgtaggatcaccgttctaaaatagcatccagatttcttcctgaggaaccatctccaacggatggcccacatggtactggagatgattctcctgctgcagtcagaccagaactgcagacagtgctggtgtgatgacctgaccagagctagtcttgtaacaggctttttctcagacttagaaaaaggctcagatttatttttatttccaactcaacttgagctgctggtcctgccttactagtgtgcatcttgagatgaaggcagcatcacacaatagagtaaatcaacgctgacacactgtgcatggatgccattcctgagcagtgtctagtgctccataagccattggctgtggacacatgggtttctgaactgttaaactcatttatattcaaactgctctgattgattttcttttatttgtgaacaaagccagcacacaaatattgtttcaagtttaatctttgttaacctggctgtttaacccagtgttctgagtctgagactcttacattttgtttttttaacataaaatgtatttaatattgacatatcatttctaagagattatattgttaattcagaaaaagaatgtgttatctacattcttaaaatatcataaagatttagacaatgatttcttttttagaaagttatctaaattatcactaatatgaaatatcaggtggaatatcgtgtatttgtttttctagtttagaaagaattaatctgtagcttgtatgtattgactttgtgaatgatgatagtttttaaatgtttttaattgacactaggattataccacccctttcctccctctagtttctcctaggaacacttccttgagcttctcccatgttcccctcactctgaagctgattgcctctcttttcatttagtattaatgctacatatgtacatatgtacacagagatgtatgaatgcaacttgttgagtccatttttgtttgtgggtatatggtttgtgtgtgcttgtgcatattgaacaactagtaagtgggctcagctctggaaaaggttaattctctttctccaaaaggtcattagctgcctatagttctttgtctaaggtggggccccatgaaattcccccttccatgttactacatccattgatattgccatcgttctggtcccttctgggagggactgtttcacagcaaacttcctgatattctggctatcattacctttctgtgttctctttcatgatatccctcgagccataggtttgggatatgagatgtagatatatcgactggggctgggagccccacagtatgttgacctccgcattgtgtccagttgtggatttttgtgatggtgtctgtcttagttagggttttactgctgtgaacagacaccatgaccaagataagtcttataaaggacagcatttaattggggctggcttacacattcagaggttcagcccattatcatcaaggcaggaacatggtagtgtccaaggcaggcgttgttcaggcagagctgagagttctgtcttcatctgaaagctactagcagaatgctgagttccaggcagttaggatgagggtcttaaagcccacacccacagtggcacatctactccaacagggccacaccttcgaatcatgctaatccctgagttgagcaaatacaaaccatcagtgtccatttgctaccaagagaggcttctttgatgagagagagtagctacctttatctaggaagggtggctcctgcactgttagcagcttttatacacatatagttacttttattaattcggtaaattatcttttcatatctgatgctgaattttaaaagttttagcatttatttatttttactctatatctgcacatgcgtatacatatatacacatgtgctgtggagcacatgtggagatgagaggacaacatgtggaggctcagttttctctctgccactcacctagagttttgagttaagatgcttcatttatctatggaatttttccttttctttctttttgattatgtacatttttaatatgactaaataactcagtcatggtccatggacctgcagtttattgaaagacatcattatagatcaattaggtcatacagactctgtgcaaacaaggctgtcattgttctaatcattactgctcaccatcgttatcattgctgccatcatcaactgaggaggataatccattctccagttagaatgtttcgactcattcattctcattgactgagtcacgtgttagtttaccaacactcaactgcaggatagaaacttctaggctgccactcgatgatggtttgtgattttgtatgtgtctgtgcaatgggatagtgagggagtctctgctcaataattatgagatgctaacacattaaaaaaaaaagcaagtctctttatagctactgtcagcactgggcctgctactcagtgtgttgtgcaaatgggacagcctgggttgtacacttgggaacatatattcctaggagcaattacccaggaaaatctcctctttccaaatataaatctgacttaagaaggtaggcatggcaacacccctctgataagaagaaaaacagtattgcaaggttgcctcatccaaattggactcagtggcaggatctccatataagtagaacatagaaactcttaactttccggttcttattgaaaaacgtattgtctagatagctattccttaacaaacaatggcaacatggacaacactgccactggagtattgcataattaatgaaaacttgactgctgaaaatggacaggctgcctgttggaaagctaagtaaaatgatttgaactgaatcttttcagggaaatccgaattcttcaatggatttaaagacagttctctaatgatatatggggtgcaggatacccacataatggagttgtgagtcagcacaagcagtgtatcttattttcaagttagcttactttcatttttgtaataatttgaaaattatttagcctttccccattatattgaaaatagagtcttttctcatgcaatatattctgattatgacttcccctcttcttccccttccagttccacccccacctcccatcttctcctggtctaatccctttctgcctctcattagataagaacaaaacttctaagagatagcaatcagacacaacaaaataaaatataataaaacagaaaccatcacatgaaagttgtacaaggcaacccaacagaaggaaaagagcctaagagaaggcacaagaatcggagacccattcaggagtcccataaaaatactcagctgaaagctataaaatatatgtagaggaccctgtgcagacctgtctaggccctggttcttcagtctctgctcatatgagcctgacttagtggaatcacaggactttgttttcttggtgtcctccatcccctctaggtcttagagtctttctccctcctctttcacaggaatccctcagctctgaggggagggatttgatggagacacaccatcagagctatgtgtcctaaggactctgactcttccttctcttcccctccccccatctctctctctctctctctctctctctctctctctctctgtgtgtgtgtgtgtgtgtgtgtgtgtgtgtgtgtaatgtctgaatgtgggtctctacaaatacaattttattaagaaatgagctagtaggaaatcagtactcaatatttattattttatttaagtaaggctgggtaaacagcatcatgggacagcacctgctgtgctggaaaaaaggacagaaaaggattgtgagtcaggaaggatgagtttatgtccgaggatatttattcactgtgtggtactaatgacatctgaactctgagactcagttattgacttccttcatggaaaaaaaaaaggaaaaaacaaaaaaaaagaaatgcaaataatagtcctgacctcaagtcgcccttaaagcgctgaggaatctagggagattgttgtcctaaaagcgttttgaaaaaatgctgtatttccatttttaaggtgagatgtttccccagcctgttagacagcaggcagaaaaaatatattttaacagatactttatgtaaaattatataggcaataaaaattttattgcataaatttattcaattttatgcataaatgtccataggatgactttatttattttttttttttacgccccgcgggggcccataggatgactttaaatagcgtgctgtattgtttaaacagttgtcatatgtttcattctacctgtgtggttgtatatatctttgggtagtcattgggataaataaaaaggaaaaacaacatagatgtatttctactaaaatggttacactttctccggaatcaacttttatatcacagggtgtctgtcacaactgtatgcaaataccttcttcagaggtggggatctggctgccatctacaccccggatgcccagcactgtcagaagatgtgcacgtttcaccccaggtgcctgctcttcagcttccttgccgtgagtccaaccaaggagacagataaaaggtaagatgtccgtgagtccaaccaaggagacagataaaaggtaagatgtccgtgagtccaatcaaggagacagataaaaggtaagatgtgctgttttatcactgccgggtgagacgtttctcaaatagcttcctgtcgtatgcaaaattggtgtcatagttctcagagtgttcacagactgattgcatcagaagctcctaggctgggttttctccaatgcaaactactagagtgctgaacccagagacggagattctaaacgaccacggcatttgttcacacagcataggagggagtgatgcttcagccaaggcctgaagacagagcgtgtaacaagaacgggtccttcctcacgctgtaatacttagctttcttcttcactttcaacacgctatactgtccccacgtgtacacttgttatgtgtataaatatgttattagtcaggttctgcatctgagggagaacatgagttttttcctttctgagattatgtggcttcacttaatatcacacattctaagtccatccattttcatacagtttttgtgatttgatttttcttcagcactaaatagcattcctttatatattttctgttttattcatgatttattatgcattaattataatttactacaaatgctacaaatgaaacaatcacacacccaaattaaccagatccagagactgtacaattcagggaccttctatccagttacagtagtcatttgaaaaggaagcatggaacttcgcaaggattctatactttatcaaatatatatatatatatatatattttaatcatatatatatattgcttgctgatagaaggtgaaaatttcacctgcataaagaaatatatttgttttacttgttaccgtatttatggggagcaaagttgaagatgtacaaaccaggaattttgttgataatagatttgaaatccagcaggcaagcctcaatggtatatgtagtgagcctctctctctctctctctctctctctctctctctctctctctctctctgtgtatgtgcatgcatgtgcatgtatgcatgtgcgtgtatcattaagtggtaattttggcaaggacaaatattagaaatatagttcggaattttaccttaattttctttcatttgatcaatagtcaaatgtaaatttttgccttccattttcatacacattacttttatcttcggtctatctgaatttaagaattagaaatttgaaactcattctctgatctctacatgcttacctgtacaaaacaaaataaaacaacaaaaacaaaaccaaaacccagactgtatgtgtgattcactttttttaaaacttgaactaggtcctaggattcttataaagagtaaagttaacaccgagctgatattgaagattgaaaaaacctccccttatatggaaactaccagatcaataaaccagatgaatatcacatacagacccaacttagctgattcaaattttttaaagtaaattacaatatttataaaaataatcaccattttagaaaacgtagaagtttcagacaggagaatcattggttttaaaatcagcttgtgtaagttaacaagatcttttctcaaaatagactaaataaaagctggcagtggaatgggaagaacgaggctgttgagtgattagcacttgatgaacatatctgaagcccaggctttcctcctcagtcccacataaaccaaaaccaaaaccgattatcttctggaaagaggagctatgaaataatcctcaactctgggatgtgggtggccttctgcactcgaagcatgaacactaagaaaaccaacgattgtagatagtatgaacttgtcttaagaatgtcctttccagcacatgtcgagaaatgtaattagtttcctgaccttattttatttattaacatatccaaaatgctgtataatttcttaatgtgtatttgtcgttttattccccttttaaaatgtgatttttttttaaaccaggtttgggtgcttcatgaaagagagcattacagggactttgccaagaatacaccggacaggggccatttctggtcattctttaaaacagtgtggccatcaattaagtggtaagatgtggattttttttccaactaaatttatgttactagcactcaaactcagagtagtttttgctgaaagtctatactatgatggacttttagaagagaacaccgagaaagataacagacggagcagcatcatggacctaaggaggggtctttcttcctgataatgttcatgtctttatcagttgtaatgcacggccttaaagggcttccattatctatagtactcacacacaatgtaagatttgtgggaaatgaatgtgtagtccagataataggtcttctgttccatagcagacatttcagataagattcaggacacatctcaccccaaagtgaaccctggagagtaagtcattgtcaccaccagaactgattgtgccctttccacatcaaacaacagttggtattctctggggacaatttaggtggttacaactgggagagatggtactctatggtaatggccaaggttggtgcagtcagacacaacaacaacaaaaaaagttctgaaaagttctggcccccactagggtcattgagaagggtttaagatagtggctctcaactgtccttacgctgcagctctttctcttgttgtggtggctcccaaccataaactatttacatcaccatttcataactataattttgctactcttatgaatcataattataaatatttgtgttttccagtggtcttaggcaactcctgtgaaagggtctttcaatccccccaaaaggggtcatgacccacaggttcagaaatgctggcttaagagatcttgtttgtcactcagtccagactgcaggactgagttctgtcaatcttgctaagcatactatttcttgcaaggggtgtaaatgcaaggatgttagagagctttctctcaggccaccattgtaactgatgtcctaggaaacaacatcctaatttccacaccatcttaaaggcttaatacaaagagggcgttttaataaaacgatgggggctgttagaaagtgaaagtgctaacaaagaatgagttgggttgtatcgtttagctttgtttttaacgtcattcattccgtaggctcaaatttcaaatgttctcattttgccccaataacaacaaccctctcaccacatatacagtcagagtctgaaacttaagctttagggagttaatgaagggtgacaatggcttagttataaatactgcttcactggtgtaatatcttctctatcttataagatcaaacccatataccaatataacttgctgcatattatttgatgaaatgttgtgtctaattattgtgaccaacaacaaaatataaaaaaatagaaacattatgccttttccaaagctgcttagttgtcacatgccccctcccccctagcttaaccttcttcactgagtttggctctaaagtttatttgcaactttctcccaaatacctttgagaaagatcttcaagttaaaaaatgtttgcaggaaccaattttagtaaaaactattgagaggcaggcttaatatttacagataatcattaaaaatatgttttatttgtaactacttcatcccaatcctcagttcatttcctttcttatctgaagcaaatttaaaagaaccccatttttatgatttacaattttctgccctgtaaactgctgggagcttagcacccctacaccctaacataatgctttttcaattagtttatatatacagtctgtctcctgtgtttaaattaatttcacaattcttagaaacttatagttatgtacaatagaatattgtttgtgctaacacacacacacacacacacacacacacacactgcttgcttaactaagaatctaattatgttgtcttaaaaacaaaacctaagagcttaatttggcttgatttctgttaaaagaatcaactatttttaacatgtaagataaacttcaatgaagggatattttaaataaactgaagaaacgttttaaaactggcgtgctagtgcatggctataatcccagcactagggaagcaggggcaaagaacattttaagttcaaagccagcctgatctgaagtgggagattaccacatccagcatggcttgggtcctggaaaactgagaggaacatcaagagaataagaaaggacagacacagagacccctgtccagagaagctagaacagtgtgagctttgagcactgaacctccaatccccagagtgcttattagacacagcacagtggaggggttaactagtcacagaggggtgtctccctcttggtctctcctcttggtctgtaatcatcttggagtagaaggtgacgtcacggtacacactggtcaatagttcctaaacactgttgctgagacccagggaaggctttgccgaagtcccatggggctgagccattggtccttcacatggctacggacttcaaactacagatttcacctgctcctttcacagttactcagggcttcccatggttaccacaggagttccaagccagccagttttgaaaggacaagaaagggttcggtggctgcggtggtggtggtagtggtgatggtggttaatagaatttaagaaagttttaaagcaagaaggaaaatgatttcattgtgcatataaataaattgagataatctgttaaagattcgacacagatatcagtgttgtgactaacagtcacaaatcacaatcagacctgaatagatgaaggaagagaaatagatgcagatcgtgattttgttgatttgtctgtttttttgtttcgttgttgttgggttttggtttggggtttttgtttgtttgtttttgactcagaagtcaaaggctcgatatttgtcaattactttgcgtctctgtcacacactatcaggacggttgctttcttggtttatcaatacctctgatagccttcttctgaaactgtattgttctgaattgttgcatatcccttgcagtttaagaagcagaataacctgtgtttaatgcaaaggtcaggttaagcacacctgcggtgagctaatgtctagcagcacttgataatttagacacgtgataaacattttaattcctgtacttaccagggtggtcacaaaaatgggatactagccttcaaaatgactccgagggctgagcagtttatctgtgtccaatatacatatattataatacatatatatacatatatgtatgtatatatatatggtcgaatgtctctctgtgtttcatttcagcttgccaccaagacatatacgaaggactggatatgagagggtccaactttaatatatctaagaccgacagtattgaagaatgccagaaactgtgcacaaataatattcactgccaatttttcacatatgctacaaaagcatttcacagaccagagtacaggtgagtgagtcatggttccctgagaggacattccaggatgcatcagcatccgcagtgaaaaagacaagtctgcttccctccagtcaaagacaaggggtgggcagtcctgagccccttccttccttaaatttcttagttacatacttaatttcagtggaatttcctcccagagatagtgaacttcgtttagtgactggtaagctatgtatgggcataatgtcagacaatgatgtccgccactccatttgcagccgcctgtcccctttgcagaagggaaaagtgtctattgatcactaatggcccaactgtgcccctttgtggtaacaaatattatctgcacacctttgcacacctcaaggaaggaagcataacatcttttgttgacactcaggaagagttgcctgctgaagcgcagttcaagtggaacgcccaccagtataaagccagtggacaacctggtgtctggattctcactgaagtcctgtgctctctcagagatcggtaattagatgacgattattcctctgtgtctgtgatgtcctaaggaagggttcccagaaacatccacatgctgttccccgggacccaggaatatgatgcctttttatagatgtgattacgtggaaatagtttgcaatcagagttatttgggattaccagaatatgtgcctatccactctcaggggttcttagatgataaagcgggtaacagagaggtcagtgtcagaggtagatagacttgaaaggtggaacaagagtccgaaagccaaaggggtaccagtggtctgtagacattgaaaaggacatagaacagaggaacagaagcaagccaacctttgactggcacccaggaagacttgctttggccttccagcctctaggaaaggtgataaatttctgttgctgtaacctctagttttactataatatgcctacaacaacatcattagaagaggaagctccaccataaagaaaaccacaagatcattctgtggtatccgtatccagagaaatatgcacattgtcgtgaatcaaccaagccctgtaacttcacacacagaggtagcgctaaatgaattacccggacagttgccttcaaatttaggacaccaaggtgtcagtggtgagatttactgagaccagtccacttatagtaaatagtaccaatactgaatgctggccctacaccaggccctgtgttaggtttccgaattctgtggtatgacctctgtctgaaagactgagaagtcagaagcaacatagctctttccctatttgtgttttcttttctctatgtgtccccaccaggctgtgccattcagatggcttaaatatattaactatttaattttaatattccccttttctagtttttggaaacttgtctataggagatagggctctttattcaacagtgttcccttttgtatactgcgcttatcttagactgcaccctgcagctatagccagatgccagaggactgggaaacaggcaatttaaaactcaggatgctgactgctgcaaataccaattgtcataatcaccttagtttctatgttgaaaagcaagcaaactccacatcgtgtcactgagaaatgttcaccactgagttcacaggttgccccatggatattttccagcactttgcctttgcagacctgaatgtaagccatgtcgtcacccccgatgccttcgtgtgtcgcaccgtttgcaccttccatcccaactgcctcttcttcacattctacacgaatgagtgggagacggaatcacagaggtgagtgtcagcagcatatgctcccttcttagccttttccggtcctagcagaggcttgcaagggtcttgctggtttccctaacagcgctggagcctgtggtttaacaggatgcttttcagacgggtgcaggttacttcgcagattagcagattcatcctcacactttccttcttccataaaacaaacgcgctattcactcagaccacagtggcaggggcaaagggagcaggcagcgttctcactggcattaaggttgaggattggcttgggtaacagctgctcatgcaatccatcctttaatcttgtgagaaatccgagccctgcttaccctgatctagggtctagtctgacctcttcatctttacacaacacttcctttatgtataccctggggccggcaaaaggatgcgtgtggacgtaataccgcaggcagcataaatccaaaccaacagtcctttgatgccttctctttttctttttctaattagaaggtggactttaatcctctgtcctcttctctggctgtctgtacttactaggttttttttttttttttttttttttttgccggagggagaggtggctccatttacatttaagccctgtgatattttggagtcttgttgtctgactgactgaagagaatttctcagaatacaatttacagagttgctttaaaaagaaaggaagaaagaaagaaggtaagtaggtaggtaggaaggaaggaaggaaagaaggaaggaaggaaggaaagaaggaaggaagggtgggtcttagtcagggtttctattcctgcacaaaacatcatgaccaggaagcaagttgaggaggaaaggaattattcagcttacacatccacatcgctgttcatcaccaaaggaagtcaggactggaactcacacagggcaggaggcaggagctgatgcagaggccatggagggatgttacttactggcttgcttcccctggcttgttcagcttgctctcttatagaacccaagaccaccagcccagggacggcaccacccacaatgggctgggtccttcccccttgatcactggttgagaaaatgccttacagctgggtctcatggaggcatttcctcaagggagtctcctttctctgtgataactccagcttgtgtcaagctgacacacaaaaccaatctgtacaggaaggaaggaaggaaagaaagaatatgtctagtgcttctaatgctgtcttctttctctttcttgtttatttttaataggaatgtttgttttcttaagacatctaaaagtggaagaccaagtccccctattattcaagaaaatgctgtatctggatacagtctcttcacctgcagaaaagctcgccctggtaatgtcactcaacctcgatggcgtgtgacttgtgtcctggtttggttcttggttgctgtaataaataccatgaccaaaagcaagttggggaggagagaggtgttttgttcacatgtccctgttatagccgattcctgagggaagtcaggctaggaactcaagcagaggcaaagacaggaactgagcatagacctcagagaaatgctgcctttttgacttgctcctgtgattgatcatatatgtgtatgtgtatgtatgtgtatgtgtgtgtttgtgtgtgtatgtgtatatgatgtgtagatgacgtatgtatatgtgtatgagtttgtgtgtgtgtttgtgtatatgatgtgtagatgacgtatgtatatgtgtatatgtgtacgtgtttgtgtgtgtatgtgtatatgatgtgtagatgtatgtatatgtgtatgtgtttgtatgtgtgtttgtgtgtgtatgtgtatatgtataggttgtagatgtataagtatacgatgtatatgatgtatgcatcatgtgcatatgatgtgtgtgtgtgtgtgtgtgtgtgtgtatcagtagcccatgaccacctgcccagagtggatactgccccccagttggctgaccctcttctttccatcattaatccaaagaacatcccatagacattcctttaagttagcctgagggaggcaattcttcaagggatgttccatcttttcaggtgactcttttatgtcaagttgacaaacactaggtgtaccacatcttgggagcctctaagagttaatgaaatgggtctcaagtccctagaaacgttgccaatatgccttatgtcctgacttgtcatatctcctttggtgtttgtatgtggtgcagaaccctgccatttcaagatttactctggagttgccttcgaaggggaagaactgaacgcgaccttcgtgcagggagcagatgcgtgccaagagacttgtacaaagaccatccgctgtcagttttttacttactcattgcttccccaagactgcaaggcagaggggtaagggaacctttctttaacgataatcagcaaggtaatttttttctagttttctctctctgtgggtttaattttgtactgttcatttttttccaggtgtaaatgttccttaaggttatccacggatggctctccaactaggatcacctatgaggcacaggggagctctggttattctctgagactgtgtaaagttgtggagagctctggtgagtgaagctcacttgttatggaactgcatggctggcttgactgctgtgatgaatgtcttggtcttatataatgggattgtttatatggtttctgttatggtttgtatgtgcttggcccagggtgtggccctgttggagtaacttgttggagtgggtgtgtcactgtgggtatgggctataagaccctcatgctagctgcctggaagtcagtattctgctagcagccttcagatgaaggcaccatgcatgcctggatgccgccatgttcccatcttggcgataatggactgaacctttaaacctctaaaccagctccaattaaatgttgtctttataagagttgccttggtcatggtgtctgttcgcacagtaaaaaccctaactaagacagtttccttggataaagggagggaatgctgatctgtgtctaattctgccacacatctcaacacttttcagactgtacgacaaaaataaatgcacgtattgtgggaggaacaaactcttctttaggagagtggccatggcaggtcagcctgcaagtaaagttggtttctcagaatcatatgtgtggagggtccatcattggacgccaatggatactgacggctgcccattgctttgatgggtaagttttcgatccatcttattttaccaatgtgtgtgtgtgtgtgtgtgtgtgtgtgtgtgtgtgtgtgtgtgtgtgtgtgagcatgcacgtgtatggacccttacctgcacatgtgtatataaagaggttagcctcaggtatcttcgtgtactgcttgcttttcttatttgttgagacagggttgttcactgagtctagtgctaacccttttgactagactggctgcacagccagtcccagagatctgtctgcctctgtctcccggcacattcttagccctagttcagtgttggggctctgaacttgaatgttcatgtttgagaagcaagccctttgcccacttagccatctccttggccctgaggcatttgttttgatgataataaaagtttccaagcctttgtctagaaaatattatgattttaaatttagcttatatatcttttacatggtcaatttaaaattcaaaagatatgtaggtacattttaagcaacaaaataaccttaattcctactggggcttattttaatcgttacagctgcttgatggctctgatgtaatgaaagcaattgcttttaggtctggtaaactgaacttaattctcctaaagcttcttcaaaaggcacagaagcattcccgtatttttacttgtaataaatataaagcaattgttaagtttgttttgagtattttcaaccacagcttttatactgtgctctgtaatcctatatggacacagttcagctgaatatgagcccctcaaagattttagaaacagtaaagggatcctgaaggaacactgaccaaaattcaatcaaaataaaatgttatgacaaacctgaggcattctgagaatcctctcctgtgcatatttcaggactccactgggtttgtaaacatacaacatgcttactgtgcactgtgcatgccaccatgctgtgtagtaccaacagatggtaccctaaagacaatcagactgaagattatgtaatgttgtgaaccatggtgtctgtagtacgtgtgccttaggttttctgctcttacaaaacataagagtttaatttcaaagaacaaaagcattaaaatgtgtcttgtcacagtcgcctttgggttgtacagtgttaaactttgattttcaacattgtttcataaaaactcattgaatgaacttgggtttgggtattagagtttccaaagctttctaaatggtccttaatctaagactatcatttggtcctccatatgtatgtgaagtggtgttcttagcattatcagttataaaagtaaaatattaagaaactcttaaaagcattgaggatgttctttgtcttatagtatcaaatattcagacatattttaattatgtatgtcgacataaataaacacgttattctattaagatgtgcatttgctgataagtggtaaaattatctgtgcaccaaaaattgtcttgtagtaagtttctttataatatatcatcagtaaatgtttaatatgtgtgcctgcttcatgtaatcacacacaaaaacaaaaaattatcttttcaggcaaaagggagtctcacatggacaaagttttattataaactaaatcttcgaagtccaatactgctgctgtaaacaacaataggtggccttgccagaaaaagtaactaggtcatatggaatgttttcgttcttctccctcctccccttcaaagaaatgtgctaagaaaaaggagcaaggaaggatgccaacgttactttgttctcctgcttctctcctaggattccctatccagacgtgtggcgtatatatggcgggattcttaatctgtcagagattacaaacaaaacgcctttctcaagtataaaggagcttattattcatcagaaatacaaaatgtcagaaggcagttacgatattgccttaataaagcttcagacaccgttgaattatactggtatgcagcgtatttaaggggaaactgtacaattcacttgtattggcgttagcttccagttcaatttgagcgagaagacagatctgcagcaattgtctttgtgtcctggttggtggggctgagggagagatgaggctgcctgggaagtaaaaaccccacgacctaccatgcatttgctgctacttaagggggcaaaagagcttcattactttctcagagtgcaacggagtgtatggtattgaaacagttggtatagggaagattttgacatctggggacattgggtatcttttgacaagattggcaggatgactcttgcttgggcttaggaatatacaactatatgaacatgaatgggactagaggttagtgcctaagaagacactgggctgacagtggaggaacatgaagaatggaactgccattggtggcacatcactccacagaaacagaatgcctgccaataccattagctgcaagtgtctgctaacagtcatgtgtccttagacagctcgcctttcttccttccacctctaatatccactgtatgtgtgctgactacttcattgctttcttgcaataattaagcaagatattcaagtaaaataccaggacagcatggctatgtttgctctgcttctgaattctgttacagtgtaggtttaccaaagcataaggatgtttaccaatacattttggttgaagagtccctcttccccatggaaatttcattctgaaatgccattcaaactgtgagaatttccttgaatcatgggctttagaaatggctggagggccattctttatactctttagtttcagcaatggtttcattatatctcatacatgggcatggtatgttttgattgcatgcacccccttcaccctctcttgcccttcccactcctgttgttcgccctactcctcccgtgtagtcccacatggctcattcttgctctgttgctttgtagaaaaagaataaggcaaaagatagatattaatttttcagatccctatctatggttttaattagcctaaatctattcatgaaattttctttcagaattccaaaaaccaatatgcctgccttccaaagctgacacaaatacaatttataccaactgctgggtgactggatggggctacacaaaggaacgaggtaagcctggcatgtggaatgttcctctcttatgtgctaaggtacatggagtagagccactcaacaacccgtagtcatgatccttctgtagatccattcaacagcccttactcatggcctttctgttcattccaaaatgatcccaagaatatgacttttttgcattaaaaactgatgagctaatccattaaacatattactcataatagagatcattttcatgactctgcatcaagaactgtaaccctatggtgctcttaagtccactgaagctcatctgatccccagttctcacagcatccctgtttactatgctctcccttgctatgaatagccaaagtgccagcatctctttaaggacagtgccatatatatatatatattatagtatagtagtgccaaatatatatatttgtagtataataaatctaactttccctctaattatgctgttaacttcttgtgtaaaatacatagattcataaagacaagtagattgcagcacaattgccattatttttagcagaatttcacacagggataaacatacatctgtattaatgtaatccttagcaagttgtttgaatatctaccataatgtttaaataactatgcacaagaacaatatcttcctttctgttgtaactacaattcaaagaatccgtgactcttacacagcagtgctggtgacaatatcacacttccgtatttgttatctgcatttgaaacagagggtggggttcagccttacttggaagggagagactgtagaggccagtttttctccttcccttcctcggagtttatggatagatcagttgtatgcgtggctctcaaatcaagggatctgtgtgttaagacttgagacatttctctagaaataagcatgttttccttttagactgagtgccagatagcatgtttgagtgatttttttaaaaaaagagatgattggctgtgtcttctttatattttctgaaccagttagtactgtattcaattaatcctcattttcactatgttgacttggctacaaatacgtggacacacacatatacatgtgtgcacatgcacacacatacacacacatacatatacacacatacatacatacaaccaagaaatatagaaatgggtgtagaacaaaatacttctctgctgttaaatgtttgggatttattttcataaattgtatatttgtgttataatttgaatttataaaacaatgaaaggcaagagcatccacgtattaaaggtacaaatgtttaaaacaacatatttttctgaggagagccttggttgatacaggaggatggctgagatcatagaaaccaagtctgtggtagcttgggtgataggggagcttcagtcaacacagatcattgcttcttcatctccatctccctcccctgctctccctccacttcttgcttcctttctccctccctctttctcccctacttattgtatttcctctctttaatgctacttcctgattgcttcataggtgagacccaaaatattctacaaaaggcaactattcccttggtaccaaatgaagaatgccagaaaaaatatagagattatgttataaccaagcagatgatctgtgctggctacaaagaaggtggaatagatgcttgtaaggtaactctgggaaaaatacgtaatagttcactggagactgctcatccaaaagcaaatttcccaagttacatttcattagtttcagttttgaagttgcagagttaagtgacatggagacttttttttttttaaagatttatttttatttatgtgagtgtacactgtcactgttttcaccagaagagggcatcggattccattacagatggttgtgagccaccatgtggttgctgggaattgaactcagaacctctggaagagcagtcagtgctcttagctgctgagccatctctctagccccagacctggagactttttaaacagcctttaacaaactaaacacacacaatgcacatcatgtgttccttataatagttacgttagaatttgtattgactgtgacgggtgtgtcacagtcagtacagggacatgccatatttaaggacaattttacatacatggtcatgctaaaatacaaggaaacagatttatttgaactttgggtaaagatgctaaaattgttgggtttatctgagaacgggagagggaataaattggccttgtaaccatccacttactttcttcatggctaatggggtgcagagaaattgagaagttgcatgtgtgatatgtaaaatatgatagcaaaatgttaaagacatctatctttgaacaaggggctcctaatttgaatcatcactgttatagctctctatcattttttttctactcactgtgatccagggagattccggtggccccttagtttgcaaacatagtggaaggtggcagttggtgggtatcaccagctggggcgaaggctgtgcccgcaaggagcaaccaggagtctacaccaaagttgctgagtacattgactggatattggagaagatacagagcagcaaggaaagagctctggagacatctccagcatgaggaggctgggtactgatggggaagagcccagctggcaccagctttaccacctgccctcaagtcctactagagctccagagttctcttctgcaaaatgtcgatagtggtgtctacctcgcatccttaccataggattaaaagtccaaatgtagacacagttgctaaagacagcgccatgctcaagcgtgcttcctgccttgagcaacaggaacgccaatgagaactatccaaagattaccaagcctgtttggaaataaaatggtcaaaggatttttattaggtagtgaaattaggtagttgtccttggaaccattctcatgtaactgttgactctggacctcagcagatcacagttaccttctgtccacttctgacatttgtgtactggaacctgatgctgttcttccacttggagcaaagaactgagaaacctggttctatccattgggaaaaagagatctttgtaacatttcctttacaataaaaagatgttctacttggacttgatgggacagagcaccttttcatataaaccacctttctggccattgctgctgagtcctgcatggtcatgagtaaggagctcgtgacagggtttcccacccctggagcaaaaccagctagatgttaggcttgtttgtataaatttcaagttcctcctttgggaagtattctctctgcctagattattgggggaatatcctctctgtcagggcagcccttaagattgtgggaaacatgagaatatataatttctctacaatgcaaaatataaggatacagtctgaattatataaggagatccatggacctaagagaacagaggcagctacactatgagccagcttgtcagaaagatactactgaaggagttaaagagataaagagatttggggaatagctatcacagggcaagatcccacccagctaagtttattatttgtgtttacaaagacagccagattcctgagttcaaggtcatcctgggacagagctggtttaggcccagggtaatgggggtcccactcagctagcttattgtctatgcttttaaatgcaggcagatttctgaattcatttgccatgttaaaaaaaatgtacctgatgtcttttcctaagatatacgggtctagagtcatggaatgctgattcatgggttaatcaaaagggaacctagagtaaacgcctgtactgatagatacataaaagtctgggctttggtctacaaatgttgagctatgtggatgagctgtgtagagctaaagattgaacagtggtctctaattatttttttagattatttttttctagcagctacccagagagaacggcttagagagtaaatattgctattttagatttttttttctagaaaatccaagaatttttatagcagcttttctgacactggtcagaaaacccatgagctatccagaaagcttttagatttttttttttcaagagagaactgtctcaagtagagacagctctctcaatcagagagagctgcctggagcagaaagctatctcgatcagactacagagccaagagctatttacaaagagctgtctagggagccattttaagcaggctataaggctgtcagcttgcaccccatcatttgactttgagttgtttctttcaccactctcaaacaccccttctctcaggaactcctctccaagccaagactggttcttggcacattgccacatggtcttggctacgtatgcatgtaagacctgtagggctatatttttcttcttgtgtgcagctccaacaataggcttatcacacagtactcatacagggcacggaatctgatgagaatctcccccagggaaccctttggagttcggttgatactgtattctgcaatagtaattcatggaatgtcattggatgtaaagtgttgtataaaattcaggcttgtagttgagttgaaagtaaaaagcaatcttggaagggatgacagtaatcctcatgtaagacaaatttccagcttcccagtgattcataaagtggaccatatgggcttaactccatttagttaagctgattaatatttagaattagccatttacaaactattgtgcaagttaaatagacaaacagaaaagtgaaatttcctaaagaagattaaacctttcactgcaaaggtttgttgagtagtgcagaggattaaatatggaaaagccagtgggttatccacagaatttgccacgggaagtggaggaggtggttattatctgaggagcaaataaatggcttttgtaaaatctgtctggattcccatgaaatcactcccctttaaagcacaccacttcaacttttaattttgtatacaatttcatcttaatctgttctgtgtggaagttattttatatttaaaatgaaagaagtggttctcaatgaaaatcacgtatctcaggatttcatactgataaccctaacaggtgttcacacaaggtgtcagagtgctggctgggtagaccttgggctttggtttctcaaggaatggcctcatttgatctaaacagttttgaaatgtttaatttccctggggcataaagtaacattataacattgccagtgggagtccagttagattggaaggctctgtttattttttgttgtgtgttccagcacaaagtagcctgtcttccacttggggccttatggggctagtgagaaagtgagaggcttgaataacatcactgtcacaaggcagagaggaggcaggaggccctagatctttggcaggtccatccaaaaaagggagtgttatctctgggaaagaacacggttcttcctgggtcacacatgcagaacacactgcatactgttcacatgtgtggagttcaacccaaagctcagagggctgtctctcatcgttgacttttcttcttgtaattcttgcttatgcctgccagccctatagattgtcagtaactaggaaggaggttctccctgactctgtctctctctttcatcaatactacatgtgaatgagcatgtggcacatgtctccctttagatttacctttattatctttgttgatgtgttgtttaattgtatgtcacgtggttgctagtgcctgacaccaactgatcaaagcgtaacttctgagcaactgccttctaccagagtaaaatagagtagtccttcatgtcaagatctcttcaaagtcatacacaggcacacacacatggacacacatgcaggaaagcatggacacacatacacatacacatgcatacacacgtgttgtagttaccattattttgagtgtttactataccccctttttgcctttaactatttattaggtatttctaccctactttagataatttagttcccaaataaaagacacaggaatctttggatttagaataaactttagagcactgggcagatatcaaccctctatgctatcttgtctgtttccctatcaaattgctggagatactactt

SEQ ID NO: 16 - skipped

SEQ ID NO: 17 - RNA, 2353 nt, Macaca mulatta
  source 1..2353: mol_type = mRNA
ggaagccgttcactagtcagattgaccagagattatgggtgggctgtctgttggggtctatgcacaggatttctgttggagttctaaggacaaaaagttgaaactgttggcagaaacccaaagtcaatatcgaagccaaggaaaacattgcctgcggtgccacattagaacagcttgaagaccgttcatttttaagtgacaagagactcacctccaagaagcaattgtgtttgcagaatgattttattcaagcaagcaacttatttcatttccttgtttgctacagtttcctgtggatgtctgactcaactatatgaaaacgccttcttcagaggtggggatgtagcttccatgtacaccccgaacgcccagcactgccagatgatgtgcacattccacccaaggtgtttgctattcagttttcttccagcaagttccatcaatgacatggagaaaaggtttggctgcttcttgaaagatagtgttacaggaaccttgccaaaagtacgtcgagcaggtgcaatttctggacattccttaaagcagtgtggtcatcaaataagtgcttgccaccgagacatttataaaggaattgatatgagaggagtcaattttaatgtatctaaggttagcagtgttgaagaatgccaaaaaaggtgcaccaataacattcgctgccaatttttttcatatgccacacaaacatttcacaatgcagagtaccggaacacttgcctcttaaagcacagtcccggaggaacgcctaccactataaaggtgctgaataacgtggaatctggattctcactgaagccctgtgccctttcagaaattggttgtcacatgaacatcttccagcatcttgccttctcggatgtggatgttgccagagttctcgccccagatgcttttgtgtgtcgaaccatctgcacctatcatcccagctgcctcttctttacgttctatacgaatgcatggaagatcgagtcacaaaggcgagtatgcatggctagcacttgctgctgtactttcatcaattttattttagaaactttacctgaaccctgccattctaaaatttacccgggagttgactttggaggagaagaattgaatgtgactttcgttaaaggagtgaatgtttgccaagagacttgtacaaagatgattcgctgtcagtttttcacttactctttactcccagaagactgtaaggaggagaagtgtaagtgtttcttaagattatcttcggatggttctccaactaggattacatatgggacacaagggagctctggttactctttgagattgtgtaacactggggacagctctgtctgcacaacaaaaacaagctcacgcattgttggaggaacaaactcttcttggggagagtggccctggcaagtgagcctgcaggtgaagctgatggctcagaggcacctgtgtggagggtcactcataggacaccagtgggtcctcactgctgcccactgctttgatgggcttcccttaccggatgtttggcgcatttatagtggcattttaaatctgtcagacattacaaaagaaacacctttctcacaaataaaagagatcattattcaccaaaactatagaatctcagaagggaatcatgatatcgccttaataaaactccaggctcctttgaattacactgaattccaaaaaccaatatgcctaccttccaaaggtgacacaaacacaatttataccaactgttgggtaactggatggggcttctcgaaggaaaaaggtgaaatccaagatattctacaaaaggtaaatattcctttggtaacaaatgaagaatgccagaaaagatatcaagattataaaataacccaacggatggtctgtgctggctataaagaagggggaaaagatgcttgtaagggagattcagggggtcccttagcttgcaaacacaatggaatgtggcgtttggtgggcatcaccagctggggcgaaggctgtgcccgcagggagcaacctggtgtctacaccaaagtcgctgagtacatggactggattttagagaaaacacagagcagtgatggaaacgctcggatgcaggcgccagcatgaggagcagcccagagtcttggcgagttttacaacctgggttcaagtcaaattctgagcctgggggtcctcatctgcaaagcatggagagtggcatctactttgcatcctgtcataaggacaaaagacagtgcactcagagctgctgaggacaatgttttgctgaagccagctttcagcattcagtaactgggagctgataatgtgaagtcgcaaccgagatctccatgattgtgtgtcgtaaaat

SEQ ID NO: 18 - DNA, 33001 bp, Macaca mulatta
  source 1..33001: mol_type = genomic DNA
actgttggaaagacatcattggttttgaaatctgaaaaggacgtgagatttgggaaaggccaggggaagaatgatatagtttggctccatgtccccacccaaacctcatcttgaattgtaatccctgcatgttgaaggaggggcctggtgggaggtgataggatcattggggtggtttcccctgtgctgtgttctcatgatagtgagggatttaaaagtagctgtttcccctgcacatgcacactctgtctctcctatcaccttgtgaagaaggtgtctgcttcccctctgccttccatcatgattataagtttcctgaggcctccccagccatgggtaaccgtgggtcagttcaacctcttttgtttataaattgcccagtctcaggtagtatctttacagcaatgtgaaactgaactaatacatctgggaaattctttttctctccttcctttctgaaggacagctttgcctgatattatattcctggttgccaggttttgtactttcagtactttgaatatatcatcccattctctcagcctacatgatttctgctgagaaatccactgataatcttatgaagcttcccttgtatgtgaagaattgcttttctcttgcttctttgaaaattctctctttgtcatggtgaggatctctttatatttaatctattggagttcttttgggcttcataaatctggatgtttatttcatttatgtctccaaattttgagagttttctgttcttatttttaaaaataagtttctgcaactttctctttctctgcttcttctggaactcttgtcatgcatattagttttcttaacagtgtcctgtaatttttgtcagctttctgcaatctttatcattccttttattactctgactgggtaatttcaaatgacctgtatctgagtgtgctgatcctttctcctgcttgatcaagtctgctgctgaagatgtttgtgaattttttcaattcagtcattgtgttcttcagttcgagaatttctgtttggttctttttatggttcctatctatctttttgttgaacttctaattttgctcatgtattattttcctgattttgtttactgtctatctatattgttttgtagctcactgagctttcttaagataattatttttaactctttgtcatgcagtatagatctccatttctttagagtcgcctcctgctgctttattttcttcctttggtggtttcttgtttccctgattatttgtgatcagtgtggccttgcattgaagtaggtacctatttcagtctttacatactagcttcagtagaggaagccgttcactagtcagattgaccagagattatgggtgggctgtctgttggggtctatgcacaggatttctgttggagttctaaggtaggcagggctggattctgggttcattcattgtggttgtctgtattctgtgcacaaggactggcttgaagcatggatccttgagggctgacttggcactgaaatgagccttaagcctgagtctgcaggggccagcctaacatggggatcacctagcacctgagttcatggggacagacctgttcctgagtttattcaggctgtcctgggaccagggtccactggggtgagcccagcatctgggtccacatggccaagatctctggaggctgacctggtgctggatctgcaggggatggcctgaattctaggcccatgggtaccaacttggagccttgggctgctggggctaatgtggaggctagagtcttgggggccaggctagagctggggcaggtctgaagtctaggtcttctgtggccaccttggagtctagacccccaggggctgacctggtctggggtgagcatggggctgaggccacagaggccagtctggcctgtggcaggcctgaatcctggtgccggggtttactggagtgggcttggtgcttggggtctgtggtgaaggtgggtgctatcttaactgtctctcttccacgcaagagggtatctctctccatgctgtgctgcccaggcttgaaggtggggtgacactggtaatgtgaaattgtccttcctatgcacttcaatgtgtcttttcttacttctgtgctgcaactgggtggtacaacctctcacctgattcctgagctctagtgaagttattttcgtgcatggatacttattcaaattgatgtttctgcaagggatgagcactagaaactcctgttctgacaaactcctattccggttcttgctgacatcactccctgaaatagttaatatacttaacagctgaacacggataggatgttcacggaatatgttgacaggacaaaaagttgaaactgttggcagaaacccaaagtcaatatcgaagccaaggaaaacattgcctgcggtgccacattagaacagcttgaagaccgttcatttttaagtgacaagagactcacctccaagaagcaattgtgtttgcaggtagcaaatttctattattctgattgtttccaaagaaactataatttttaaagtatagttttttactttatgagaaaattagtcatttatattctaatttcctgagtatatagatagtagagaaggaactaatattcctttatgtagaaatatttaaatgtaagatgactttaaatcaaaaagaatacttgattgatttaaaatttttaattgggctttaatattttcagaggttttctttacttagggatttttggactgacattattgccattatttattaattttctttttgctcaaatcaagaggtttcataactgtttaatctctctctctaccaattccctttccaacattactagccacagagtttgccaatcaacaataaacacaacagtagtctggaggtctcaatttgtatcttgggaagcattataaactttccaactccctagacacaaatgtagagaaaaaaccccttgttttctataccagaaactgtgtgctttgtcttgtaattcagacatttacaagaaaatctgtatcaccttaaattaagatttatgttaaatgcagtctaaaaccaacagagttatgtattgttttcttttttagaatgattttattcaagcaagcaacttatttcatttccttgtttgctacagtttcctgtggtaagtgaattatctataaagcatgaaattcaggctaagacaggagtagccaagcaagtcgcaccacctctggagaaagctattgaacatacagcttcggggatggagatagtccctgatgattcaggacacgtgtctatttaatgttccagaacaagtacgacttgtgagatatattgctgtatacatacattgcagaccagaggaaggagctcagaagcgggaatgtcttgggacttgtgttaataaaaacttctgttcacagatgacactctgcaaaacaaaactcaaaacaaaaaaattactcctctatttttatcaacattaaaaaattaaacattatctgaaatttcaaaagagtgctgggcattatatagtgtctgggtccaatccaagtatctgttaggtacatgatacatagttttactctggacagccagggaaccatttcaaaaatgaaagtacctggtttaaatttaacttagcaaaccaggcatttggatagttctaggtgaataactttcaacactagatttcgatctcatttctctattaatatcattaatttttggagaataaaaatgattctggacatttcattaatcgctatagagggagttttctctgtgtccccacaaggcatgattctgagtctatggtgacttaagagggccacataacaatgagtatttaactttcctctcgtatggctacaataaacgtctacagggaaggtttacattcataaagagactacttttccaggaaaaaaggctttgattccccctaaatcacaactcccctgtgtctgtccctcaaccctgattgcttttctaaaccgtaatttaccaacccatgtgcaaacccactgaaaactgaaaaggagcatgagccagggatactgtgaaccacggccacctccaggtggtttctcattttctgtttttttcttctggcaaaataaatcatgattatggctaggaaaattaaggatgtaaataagcaaaaaactataaactacatattgcatgtagtccccaaattcagaagcagtcgttgttaaacatcttttgtttagtctttcagatatttttctacatatgcctatttgcacattttacaaaaaagagttattaactatggatactctttgacttgcattttccacttacagctaccttttggtgcaaataaatgacattttttggagcttgctattctctttttatggtatgtttgtgtgcacattcttatgcacttagttatttctgtagaatacattttttgaaataaaaatactagattcaaaggtatgaatattttagaaggttttatggtgtggcatcatgaaattatctttcagaaaagttactccctagttgacttcttctaccagctaataagagtccttatttaccccacttaggccaacactaacaggcttctgttgctttgcatcccgacatgtttatctttctggaaacagtatcctaatttatttctgcagagctactgcctctcagttttggtccatgtggttctggtgaccctgactcttctgctgaaccaggaagtgcacacatcctgctgactgcagtgacccaatcagagccaacatcttgcaatgaagcgtttgtttagacgtctagaaataggactcttacttttttttttccaatttaacttgaaacataagagaatacagaggcctgagctgctggtcctattttgctactatgtggagcttgagagtaatggtaacaccatgactggagcaagcggaaggagactattgtccactgatgctatccgttgagcacaatgtggggttactccttaagccagagtcaccatgggctttttggctcctgaaccaatagatttcatttgtattcaagccactttgtactaggttttccatcatttgcaatcaaaaccagtatacaaatactggttatttaatttttcatttttactaatctcatggaaaactggcttctagttgttttaacttgcctgtatttgtgattcttcccattttcgtgtacttactaatcacttctatttcttttgtaaattatcttttcatatttgtccactaattctttaaaattagagtacttttcttctccttattgtttatgtaattgttaaacaagactgaataacctgcccaaaatccgtggacatgggagcccatgtgaaagctttgaaagccaccatcattatgagataaactatataacagtactttacatatgctccaaaatacagtacagacacggctatcattgtcatgatcatgatcatcattatcagcatgatcaccaacttaggaggataagcaagaacacctactagaagtttctttccattcagcaacaaagttggcgtttttctagtcactcccttccctgactgagtcacatggcaggtcacagaggctcaatggcagaatgggaagctctgggccagcaccagccattgtgtgcatccttgcgtgtgaacctaggtgctggaagaggagtgactgcttgataattatgagtcagtcaaaaccaccaactgtctgacaaaacagacctctttgtaacctgtattgtcactaaaccaatgcctccatgctttgtgcatacatgaaatctaggcaatacacttgtattccccaaagcttccatttgaagagatctgtgctcttcccaaatgtaaaccttacccgagaggtggtcatctggccgcacctctgagagggatagaagtcttgctgtgttgggtggtcagactggggctcagggccagaattcccagggggtaggattgtgcagagaagatggcactctccagtgcttaataaaatgcacgtggtctaagttgcccattccctcaaaggcaataaaaaaataggtactatttaaattgaagagtaactactgccccagcgaatggacaggttgtcatcggaatagccatggttaatgccccagcgaatggacaggttgtcatcggaatagccatggttaatgccccagcgaatggacaggttatcatcggagtagccatggttaatggtcagttgactgactgaaatgaatatgctggctgaccaggaaagctcattaagcagacttggaagagagtctttccaggtaaatccacatttacaaattaaagcagtaatgacacctaattctctaataataggtggggtgcagtgtattttagagctgggaataattccaaacagcaaatagttcaaaatttattttccatttagcatatgcatgcatttgcttaaactatcttaaaaatgagtaaaaaatattgtcagtttgcttgaatcatactgagatgcggaacaatatttagcactgcatgctagaaaaggacacaggattgggagtcagggctgggtgactgtcgcaggattttcattaagtgtgtggatcttgggcaagtctgtatgccctgagattcagttatttaactttctttcaaaaaacctaatccagatgcagataacaaaacctgcttctaacttcccttacagaattgtgagaagctggtggagatgtttgtaaccaaagtgttttgaaaatagagcaaatattattctttttaaggcatgatattttcatagcatgtcaggcaacagggaaaaactaagttaggattttattttattgtgggtaatttatgtgcaaattttggtgcaatttaatgaaaataagccaaagttttaatgcagaagtgcccagaaaattaaataacaatctacattgttcaaatggttgccttaatatattttattttctcagcataattagaattatattatacaggtcttggagtagtcagtcagtgggagaagttaagacaacagatatctttttgttaaaattattatttgaattatctcaaattaacttttatggttctatcacaggatgtctgactcaactatatgaaaacgccttcttcagaggtggggatgtagcttccatgtacaccccgaacgcccagcactgccagatgatgtgcacattccacccaaggtgtttgctattcagttttcttccagcaagttccatcaatgacatggagaaaaggtaaaagttgatatttcattattggagaagccatttttctaaactgaatcggttttgtgcaaagaggtgtagtataactgagagttctgtctcagacggggctcaaggaccagcttcagcaaaatcccttcaagtggttcttaccaatgcagattcctcggcaacaacccagatttgctgaaccaaagtttcttgggactagaaattgcattttaaacaatcactgtgtttatttaaagtagtagaagttagtcattttctattcaaagcctcaaaatgcttgaacatcgttgggctaagagattgtctccagaaagcatctaacaggcgaacatttcatctgaataaagaaacagacttaactgtgtgacccgtgatcacattagtggctagcacagtccgaaggaaataacgtaagacaagcattttgcggagaatataattgagaaacatctagaacttgtgattttgggacagggcagatctgaatgacgcctaaagtgagccagtttgggcacctatggcatgatgctatgtatggtatgtgtgtgttcatgtgtgcttgtgcttgtgtgaatatgtattattaactggagatttgtaaaagtattggaaaaatactacttatgattttttttttttttgagatggagtcttgctttgtaacccaggctggagtgcagtggcacgatcttggctcactgcaacttccgcctcccaggttcaagcgattctcctgccttagcctcccaagtagctgggattacaggcacgcaccactacatctggctaatttttgtatttttagtagagacggggtttcaccatattggccaggctggccttgaactcctgaccttgtgatccacctgcctctgcctcctaaagtgctgggattacaggcgtgagccaccgcacccggctgtaattacaatttttattacatcagagagatgcttattaatcacaagctacagtttcatcttaatgattttcattttgaataagaataagcttttctttgttcttcccatttccatattcataactcttttctcatcttctccacgtgagtttgtgaactagaaattggatagtcattctctgatcctacatgttaaacttgtagagaaaacccagattgtatgtgaggatcatcatcttaaaagtggaggtaggttctagaattcttataaataatgaaattaacatggaggctgacatttgagacagagggaagtctttcattaagtgcagactacaaggagttaataagcaagatgaacacacaatatacagatccagctcttatcactaagttaattttttaagtaaatgaaagtatttgcaaaaataattaccaattaaggacatagttgcctgaaggtttaagaatacaggaaaagtcattaactcttcaatgtggttgacttcctgtacttaaaaaatgtgagtgtaaagaaaacgcaatgctgaagttaaatattatggggatgttataaaattacctctaagagtgttctttccagcaagttttggggaagctatattatttcccttattcctggttttatgttagtgtatagaaaatgctagacatttcctcaatgtatgtttgttgttctacttcctaaataaagctacttttaaaacaggtttggctgcttcttgaaagatagtgttacaggaaccttgccaaaagtacgtcgagcaggtgcaatttctggacattccttaaagcagtgtggtcatcaaataagtggtaagctgcgaatttcttagctacatttgagttaatattgaatctaccttagaacagcttttgctaaaagtctgtactgctacagcctttgggaaggaatcactcataaagatagaagatggggcagtattctggacacaaaagagggacccatattcatctggacacttctgttgtctttatcaatcgacacgtatttaatgagcctctattatttatgaggttagcactcaagtgtaagatttgcagaaaatgaatccaaataatcgtgtctccttgtttccagataagaatttttaagaaaacacgagggaacatctctctcaggttcacgtgagggtaatttttatatcagtgattctcaactggcagtgatttttgtctcttccattaggggacatttgacaatgtctggagacacttttggttgctatgactagggagggcgttattagcatttactaagtagaggccagaatgcctctctcatttactaagaagaggccagaacgttcgaatgctgctgcccaaccttctacaaggcacagagcagtcctccacagcaaataatcttctggcccaaaatgtcaacagtgctgacatcaagaaactctgatataccattaggcccaaactgaagaactgggttctgcaaatcttgctaagaataatacttcttaaaggaaacttgaggactaggatgctagagaactttgattttacatctgaagctactgatgtcttgggaaataatttccaacactatcctaataaatttaagacaaatgaactatttctcaaacatgactgggactgatcagaaagtgagaagtgctgaaaagattcaactgatgggttgtcggaatcttaaaatagctgtgctgtgattctatgtgtgactatacatcataactattttatttgtattatgcacaattaattttgtaggttcaaatttcagatgtttttaaatttgtcatcctttcctccctcattgatatcaccccttcgatacatacacactttgagcctgctgtttgcatgttaaccagttatcaaaggatggcaaagcgttcgttatgaatatgggcctgacttagccagtgtaataagtgtagtctacctgaggtggggtacatttcctgttttataagaccaatgtgtatgttcatctaatttggtataaagtattcaaggaagtgctgtttccaattgttgtatcttatagcaaaatttaaagaaaaagtaacattgtgccttccccaatattcctgttattgttaatgtattctaaaactcagtgttactcacttagcttgcttttaatgtttttttctaacttcatcatcttaaagtgaaaaattgttcccaagtacataaaatctctactttcaggaacaattctagtcgaaagcatttagagctttcacatgaacacttacaaagttgttatttgtgagagtcccatcccaactcttagcctactcttttctcacacgcagaaaaattggaaagagatttcatttcgaccgtctgcaaattcctgtgtttaagaaccactgtgaataatccacctccctacccaattcccaattcgacatgcagttttcctgacagtttgtatgttttctgtctttcccacccttaaatttagttttatgacttcaaccacacttcttaggagtggaaagttacctgtaatagattatggtttattccacataatcttggggaataaaactttaaaaaagtttatggtttagacttctggtttacattacttccttaaccaaaagtctaactaagaaatttgaatatttaaaaaaaaaaagagcctaattttgcttccttgtctgtgaaaagaattatctatatcttttgcatgtaagacaaatctcagtgaaaagggtgcttaaatagaagttaacactattttaaagcaagaatggaagtggcttcatcatgcataaacaacaactctccacattttgtaacgattgatccagatgcaatttgtagtcagacaggagaagttgaaagcagagaaagaacactgggagatagagaagctccttcattcaatgcaaaaggtcaaaggcacatcagtttctttaataatgcaaacctcagcacacatgatcagtgtcctcattattattgccttgtttatttcccactgctcactgttaatttcaacgtgaaatttacctgtattgctgcatgcatcttgcagtttaagaagcgaagtaacccaatttccaagctagtgctttcaggaaaatactggattgtatttacttcgagcagagtttgataatttatggacatcataaaaattttaaatcccttaattaatatagcaattgccaaaactgggctgttatccttctaaactaccggcccaaatggtagtgggatccttctaaactaccagcccaaatggtagtgggtatctaatctacctctagaaagaaaatggactgtgtttgctctatttcctttttcttgtacagcttgccaccgagacatttataaaggaattgatatgagaggagtcaattttaatgtatctaaggttagcagtgttgaagaatgccaaaaaaggtgcaccaataacattcgctgccaatttttttcatatgccacacaaacatttcacaatgcagagtaccggtgagtacaattcatggtgtttgttctttatattagtgcccccaggatttcactgtattcttcacaacctcttttgttcccaaactaaaaaccaaacagggcttttactcctaaccactttccttatttacttactctattttatatttttatcttctttttttttttttttttgagatggagtctcgcgtgttgcccaggctggagtgcagtggctcaatctcggctcactgcaacctgtgcttcctggcttcaagcaatcctccttcctcagcctcccatgtagctaggactacaggcgcccaccaccacacctagctaatttttatgtttttactagagacggggttttaccatgttgctcaggctggtctggaactcctgatctcgtgatccacccacctgggcctcccaaagcgctgggattacaggcatgagccactgctcccggcccttcattttaaagttaaataattcatttaatttcatttgtttctctactcttttcctctggcaggtaattgtaccccatcttcaaagcctggcatcctcttccaccacttctccaaaggctgattctttcaggtctttcctcagataccgtcccctccaaagggccatttctgagcattctcttttaagccacattcagctctgtttatttcattcgtagagctaatcacaatttgattttaacttgtgaatttctttccttatttttaaatctcgtttttgtttgcatagatgtatggggtacaagtgtaattttgttaccttggtgtattgtacagtggtaaagtctgggcttttggtatatccatcactggagtcacgtacattgtacccactaagcaatttgtcatcacctgcccctttcccacctctctatcgccttcccagtctctactgtcgatcactccatgctcttctcaattgtggtgtcatttttcctgaagcgaaatttcggtgtcattgtttctgaagtcattttctgacgtctgtgtcattttttgctttcctgaagtgaattttggtgtcatttttcctgaagttccatttgccccacgcataggccttacttgtagaatgagggtttagtgtcatggtgtctcctgcctcattctcaccccaactttcccttgacccctttgcgaggagaaggatgtccatttgattaataatgcaaacccctaacccactcattatcagcatcattgttttttccactgtccgtttgaatactaaatgttacctggactgctacctccgcctcaaagtgcaggaagcaaagtcacctcttttcttcccattcaggaacacttgcctcttaaagcacagtcccggaggaacgcctaccactataaaggtgctgaataacgtggaatctggattctcactgaagccctgtgccctttcagaaattggtaattgtaggaccacttcaccttgtgattgtagtaggcggaataggaccccccagagatgtccctgtgcggagccccggtacctgtgcgtgtgttcccatagctggcaaaagcgtttctatcaatgggattcagttaaggactttgagatggggagtttactctggatttcctcgatgggcccaatgtactcacaggattgggtgctcacaaggctaataagaaaaagggagaggcagaagggtcagaggcagagagaggtttgaaggtgttacactgctggctttgaagatgaaggtccatgagccaaggaatgcaagtggcctctagaagttgaaaagggcgaggaaacagtttccctgtggagcatcctggaggaacaagccctgctgatgtcttgattttagcccagtaagacccaatctctagaatggtaagataataaatttttgttgtttttaaccactgagtttgtggttatgcccctatagcagcagttataggaaactagtacagtgatattgttataggtacaatgatattgtagcaaaactgtaaggaccttccttggttgtgtccctatctagggaaatgactctaccggggggagggaaataacattctgtcgtgtcacacataaaggtaatttcaatggaattgtccagaaaattgccatgacattccacctcatttagcgtatcaggatgttaacgacaagatgttactgaaaccaaatcccttactgccagttctccgcagtagtgggtgctggctctgtgcctggccctgtattgggtgctgggctaggatttccctgtggaagattgggaaggttggttacaaggtgtctattttcctgtctcctctttgtgacagcacaccttctccacggtgcgtgccaggttcacgtgtactgatgatgtgattttaacgttcatattatttttttccgggagagtttttgaaggctgccaggaggcaggactcgatgcaagcatgctccattctgtacccagcactgttgctggaaggatttgctgcacttacccagggaacaggcaagctcatgccgtggttctgggctgtcacagctgctgtccacacctgggagagcaccctggatggctcatctctgtacttgctttcttgttaaattgcagtgagttcacatgtgatttaatctgatcaaatggcctttacagactggtaaaaatctggctgtttcaggcagtgttttgagctgctaaaggcatggcttttcactgagtacgtgttccccgttcctcagggaacacccagtagctacgtgcctcctcaacctggagtagggctgtctcctggcctcactgcccagatgagattcataagttagggatcatctgtagtcatcactacaggtttgtccttagtttcaccatggatttttctaattttacaaacaaaacccctaaggctcctagaaggagggcagaagtgaaggtgcttgggggtcatatagctgatgagctgaacgagaacttgacccttgggtcacacagatttcacattgctcactccccattttgattttttaatggatttaatggtgttttaaagtctcctgcctctcaactcatataaattcatcatatttacagatttccttctcttgcggtccatcttcctgcatagatcttgacagatgtcagggtaatcacatcttcccagttaatttaacaaaaccgtttgcaattctgatatgggaaatctaccatatgacttattaatttatcaattgaggtgataaacatatttttcaagccaaaagtaggagaacataaactggaaaaaaaagtttttttattttttatttttttatttttatcacctctggggaagaaaatctgataaatgaacctggttgatgaaattgcaattagtgggagcaacatcatggtttctgttctgagaataaccagatggtatacttgaaatagagaatgtcctagaaatcaactggttgcttggccaaaatatctataaatagtgcccgacatattagataggaaaagcaaagtaaaagcaattttaataggttaggacattgggctgaagtattgcatatatttaatgtcacgtgcatctgtgtgaagagaccaccaaacaggctttgtgtgagcaataaagctttttaatcacctgggtgcaggaaggctgagtccaaaaagagagtcagggaagcgagataggggtggggccattttacaggatttgggtaggtaacggaaaattacagtcaaaggggttgttctctggtgggcaggggtgggggtcacaaggtgctcagtgggagagcttctgagccaggagaaggaatttcacaaggtaatgtcatcagttaaggcaggaaccgactattttcacttcttttgtcattcttcagttacttcaggccatctggatgtatgtgttcaggcttaggcccagaggcctgacattcctgtcttctcatattaataagaaaaataaaatgaaataggagtaaagtgttggggtggcaaaaattttggaggtggtatggagagataacgggcaatgtttctcagggctgcttcgagcaggattaggggtggcgtgggaacctagagtgggagagattaagctgaagaaagattttgtggtaaaggttgatattgtggggttgttagtgggagcatttgtcgtatagaatgattggtgatagcctggatatggttttgtatgaattgagaaactaaacagaagacataaggtctgaataagagaaggagaaaaacaggtattaaaggactaagaattgggaggacccaggacatctaattagagagtgcctgagggggttcaacataattagttgcttggttgctgagtttttgggctctatccttgacagagtcctccttcttaagttggaggctgagcttggtgaggtgtgtttttaaaagaccattagtcctttctacctttcctgaagattgaggagagtaaggagtatgaaggttttactgactactaagagcctgagaaactgcttgggtgatttgactaataaaggccagtccattatcagattgtatagaggtgggaagtccaaaccaaggaattatgtcttacagaagggaagaaatgaccacggtggccttctcagaccctgtgggaaaggcctctacccatccagtgaaagtgtctgcccagaccaagaggtattttagtttcctgactcggggcatgtgagtaaagtcaatttaccagtcctctgcagggacaaatccccaagcttgatgtgtagggaagggagggggcctgaacaatccttgaggagtagtagaatagcagatggaatactgagaagtgatttccttggggatagatttccacaatggaaaggaaaagaggggttttaagaggcaggctagtggcttgtaacttacatggaagaggttacgaaatgatgacagaatagaatgggcctgtgaggctggaaggagatattttccttggtccaagaactatttgccttgtgtgggaagagattgataggtggaagtttcaatgtgggagtagatgggagtgaccgattagagggaggaaaaactggccgtgagggacagaagttggaatgctagctgcttttataactaccttatcagcatgggtgttgccttgagcaatgggatctgatgccttttgatggcccttgcagtgaatgactccagcttcctttggacgtaaagtggccttgagaagagtttttattaaagaggcattaatgatggaggacccttgcagagtgaggaaacctctttcagcccatataacagcatagtggtgcaggatatggaaggcatatttagagtcagtgtaaatattgatgcatagtacctttgcaagagtgaggacctgagttaaggcaatgagtttggcttgctgagaggtaagttaaggcaatgagtttggcttgctgagaggtagtggaggggtgcagagtggtagcctcaatgatagatgtagaagatattatagcataccctgcctttgctggtgggtggagattaggcctggtggaactgccatcaataaaccaagtgtgattagggtaaggaataggaaagacagaagtatggggaaatggagtggatgtcaggtggatcagagagatacagtcatggggatgggggccagcctaaaacagtaaggtcaagttgtttctacagaaagcnnnnnnnnnnnnnnnnnnnnnnnnnnnnnnnnnnnnnnnnnnnnnnnnnnnnnnnnnnnnnnnnnnnnnnnnnnnnnnnnnnnnnnnnnnnnnnnnnnnnnnnnnnnnnnnnnnnnnnnnnnnnnnnnnnnnnnnnnnnnnnnnnnnnnnnnnnnnnnnnnnnnnnnnnnnnnnnnnnnnnnnnnnnnnnnnnnnnnnnnnnnnnnnnnnnnnnnnnnnnnnnnnnnnnnnnnnnnnnnnnnnnnnnnnnnnnnnnnnnnnnnnnnnnnnnnnnnnnnnnnnnnnnnnnnnnnnnnnnnnnnnnnnnnnnnnnnnnnnnnnnnnnnnnnnnnnnnnnnnnnnnnnnnnnnnnnnnnnnnnnnnnnnnnnnnnnnnnnnnnnnnnnnnnnnnnnnnnnnnnnnnnnnnnnnnnnnnnnnnnnnnnnnnnnnnnnnnnnnnnnnnnnnnnnnnnnnnnnnnnnnnnnnnnnnnnnnnnnnnnnnnnnnnnnnnnnnnnnnnnnnnnnnnnnnnnnnnnnnnnnnnnnnnnnnnnnnnnnnnnnnnnnnnnnnnnnnnnnnnnnnnnnnnnnnnnnnnnnnnnnnnnnnnnnnnnnnnnnnnnnnnnnnnnnnnnnnnnnnnnnnnnnnnnnnnnnnnnnnnnnnnnnnnnnnnnnnnnnnnnnnnnnnnnnnnnnnnnnnnnnnnnnnnnnnnnnnnnnnnnnnnnnnnnnnnnnnnnnnnnnnnnnnnnnnnnnnnnnnnnnnnnnnnnnnnnnnnnnnnnnnnnnnnnnnnnnnnnnnnnnnnnnnnnnnnnnnnnnnnnnnnnnnnnnnnnnnnnnnnnnnnnnnnnnnnnnnnnnnnnnnnnnnnnnnnnnnnnnnnnnnnnnnnnnnnnnnnnnnnnnnnnnnnnnnnnnnnnnnnnnnnnnnnnnnnnnnnnnnnnnnnnnnnnnnnnnnnnnnnnnnnnnnnnnctggcgaggagcagcctggggaggaggggagaggtcagatgggtccatagaaaaggaagattggaaagactcagcaacgcttggggttgggattgaggggacaggcgggagggaaagaaggaagatttgggatgagttgcattgggaacaaagactagggagggactgatgtgtaaaagactgcctggacatcaggcagctcagaccatttgcccattttacaacaagaattatctagatcttgtaggatggaaaaatcaaaagtgccgttttctggctatttggaaccattgtcaagtttgtattggggttaagcggcattgcagaagaaaataaggcgttttggttttaggtcaggtgtgagttgaagaggttttaagttcttgagaacataggctgagggagaagaaggaggagtggagggtggaaagttgcctatagtgaatgaggcaagcccagagaaaagagagggtagagacacggagagaaggggtcagggtgcttgccccccaggaaagtggtgcttgccactaagggtgaaggatcaaggcaggcatccctaaggtgatcagacacctctgaaacatgggcgcataatcaagcaggtgtccctgtagtgattaaatgccaagggaagactgtcttcccgagtccatgactggtgccagagttttgggttcacagataaaacgcgtctcctctgtctctaccagaaaatgaaatgaattgaaattaagagaagggagagattgaaggatggcgccaagattaaaaggagaaagaggttgagggatagtgagagagattggataagagagtaaaaagaggccgtttacccaatttaaaattggtgagatgttccttgggctggttggtctgaggaccagaggtcataggtggatctttctcacagagcaaagagcaggaggacaggggattgatctcccaagggaggtcccccaatccgtgtcacggcaccaaatgtcatgtgcacccgtgtgaagagaccactaaacaggctttgtgtgagcaataaagctttttaatcacctgggtgcaggtgggctgagtcagaaaagagagtcagtgaagggagataggggtgggccgttttataggatttgggtgggtaatagaaaattatagtcaaaggggttgttctctgatgggcagggttggagctcacaaggtgctcagtgggtgagcttctgagccaggagaaggaatttcataaggtgatgtcatcagttaaggcaggaaccggccattttcacttcttttgtcattcttcacttacttcaggccatctggatgtatgcgtgcaggcttgggcccagagacctgacatttaacatgaataaatgtgaagttcttagaatcatacatacacattggaaaagatggggtttaatagcactttataaggagacttgaagaatgtttgagaatccaccatgaagctgctgaaaatatcaagaaaatttaattcttatgtatataaataatgtgtctgttttacatgaattccctctatcaagtttggtattttaatatagcatatattattttttcatagtagatttaaaatttttgatgtataatttagataacataaaattaaccctttgaaagtgtacaactcagtggtttttagtatatccacctgatttcacaagaatcaccactatctagttccagaacatttttattaccactgaagaaagactgtatccattggcagtctttctccattgcctactcctccaatcccctgacaaccactaatctactttctatgtctgtggacttgactcttcgggacattttacataaatgcaatcatgcaatgcagcacattttgcatctagcttttttcatctggagtgttttcaaggctcattcatattctagcatatatcggtactttgttcctatttaggactaaatagtattctattatatgaataaaccatattttgtttatatacttagtttgatgaacatttgagttgtttctggattttttttttttttttttttttgcctcttatgaataatgctgcaatggacagcagtttttgtgtaggcatacattttaaattatcttatgtatatacttaggattaaaattgttggatcatacagtaactccatgtttaactttttgaggaagtgtcaaactgtttttgagagcagctacacaattttacattcttaccagcaacaactgagtgcttcaatctctctacaaccttaacaacacttgttattgtcttttttattattgcctttctaggcagtgtgaagtggtgtctcactgtggttttgatatgtatttccctaatgactaataatgttgtgtatcttttcatatgcttattatcaatttgaataaattctttggggaaatctctgtttaaatcctttagccattaaaaataattgggttattttgttttcattgttgagttgtatgaactctttatatactctggatactacactcttgtaacatatattattggcaaattttctgtgcatctgcaggtcatcttttcactttagtgatggtgttctctgaagcgcaaaagtttttaaacttgatgaaatacagtctggctttattcttgcatgtgctttacctaaaatgccaaaacctaattcatggttatgaagatttttgtgtatgatttgttcttagaggtttatagttttagctcttacatttaggcatttgatgcattttaaattaaattttgtatatggtgtaaagtaggaatccaacttaattcttgtatgtggatattcagttattccattgtcttgaaactcttttcaaaatcaattttctataaatgtaagagtttatttttagaccatcagttctatcccattgacctgtatgtctgtcctaatgccagttacacacagtcttgattaccataacttcgtagtaagttttgaactcagacagtctgagtgcttttattttgttctttttcaagattaatttggttattccggatcttttgcatttccatatgaattgtaggttggttgtcaatttctgcaaccagaaggcagcaggattttgacagagagggcattgaatctgtagaccaatgagtatcaatagaattatgtgttatcaaatttagtaaactacgtaaacgataggaacacagctaaaataaaactaagatataagatcgtattaatgtaatgttaataaaagtagattgtctcccattctaattttaatgggcacaaggcatttttgttaatcacttcttattaaataattttttataatattcaggaaaatacaacaacaaaaaacccttacattccaaaggcctcagagtcagagtaatagaaggaaaacgtaaacacatgctgagtaatgcaaacatttggcaacggtggtgactggagctgggagcacagcttttatttctctgacataggagtttgccccttagagttggaccagttttgccttcctctaaatgacaaacagtttggaggtattttaaaggacgttttgtcacttaggatgtttagtaccatgaataatataaatagtcataattccttaattacgatgacaaaatacaagcgaatttagcatcgtgtggtttcctaaggaacatctctctctgagttcacaggttgtcacatgaacatcttccagcatcttgccttctcggatgtggatgttgccagagttctcgccccagatgcttttgtgtgtcgaaccatctgcacctatcatcccagctgcctcttctttacgttctatacgaatgcatggaagatcgagtcacaaaggcgagtatgcatggctagcacttgctgctgtactttcatcaattttattttagagtctgagtttttaaaagtttccttcatttccctcaaaacacttggacctgcagtttaagtaggtacttttctgccaggtgcagattagttaagagattagcagacttctctgcctgtcttctcttactttaaaacacatgttaccagctgggtgcggtggctcccacctgtaatcccagcacattgggaggccgaggcgggtggatcacgaggtcaggagatggagaccatcctggctaacacggtgaaaccccgtctctactaaaaatacacaaaattagccgggcgaggtggcggcgcctgtagtcccagctcctcgggaggctgaggcaggagaatggcgggaacccggggggcggagcttgcagggagccaagatggcgccgctcactccagcctgggtgactgagcgagactccgtctcaaacaaaaaaacaaaaacaaacaaacaaaaaaaaacacgttaccattgaatccaggaagcaatagccatgagaacaaagaaggatctgacgcctttgaatgaagattcaaaacacgatcttcacgttttgtattagcttggagtaaaagccactccctggcagaatatcccttaagcttgttgcctcttccctttgtttcagaaactagagctctgtttattctgatcaaggctctgtcccactctctttatctcagataacccaccctcttctacacacagcatggagctaagagaagggtgcctagttatggaatatcatcagcagcataaactcccagaatttcttctttgatttttttgtttgtttgtttttccagttagaaggtggaacttcgtcactgtcctctcttcaggttgtctgtgcctattagttttctccagagggagatgtggtttgatttacatttaatctctgcaatttattagagtcctgtagtcggatttacttggaagagagtttcccaaaagaataaaatttgccaacttcctttttgggtgtgagctgcttttgtatttgcctaatgcctttaatgcaaacttcttnnnnnnnnnnnnnnnnnnnnnnnnnnnnnnnnnnnnnnnnnnnnnnnnnnnnnnnnnnnnnnnnnnnnnnnnnnnnnnnnnnnnnnnnnnnnnnnnnnnnnnnnnnnnnnnnnnnnnnnnnnnnnnnnnnnnnnnnnnnnnnnnnnnnnnnnnnnnnnnnnnnnnnnnnnnnnnnnnnnnnnnnnnnnnnnnnnnnnnnnnnnnnnnnnnnnnnnnnnnnnnnnnnnnnnnnnnnnnnnnnnnnnnnnnnnnnnnnnnnnnnnnnnnnnnnnnnnnnnnnnnnnnnnnnnnnnnnnnnnnnnnnnnnnnnnnnnnnnnnnnnnnnnnnnnnnnnnnnnnnnnnnnnnnnnnnnnnnnnnnnnnnnnnnnnnnnnnnnnnnnnagaactttacctggtaatgtgattcaataataatattacataaaacgtaacatatttcatgacttaacagcaacagtgttgaaacaatccacaaggtaacagaaacttttgtaaatgtcgttcattgcttttctcatttggtatcttttcatgtttataattgacacagaaccctgccattctaaaatttacccgggagttgactttggaggagaagaattgaatgtgactttcgttaaaggagtgaatgtttgccaagagacttgtacaaagatgattcgctgtcagtttttcacttactctttactcccagaagactgtaaggaggagaagtaagggacattttatttttcatgatcatttcatatcctttttcccctagtgaaggcttactctttctactgttcatttcatctaggtgtaagtgtttcttaagattatcttcggatggttctccaactaggattacatatgggacacaagggagctctggttactctttgagattgtgtaacactggggacagctctggtgagtaacctcactttttcatggaactgtaagggatgtctgtcatgttgatagtgtgcttagtcttaaggaattatatgtcttgttctccttggttagaagggactttgattcacttctaatttcaaccattagcatcaacactcttgtttcagtctgcacaacaaaaacaagctcacgcattgttggaggaacaaactcttcttggggagagtggccctggcaagtgagcctgcaggtgaagctgatggctcagaggcacctgtgtggagggtcactcataggacaccagtgggtcctcactgctgcccactgctttgatgggtaagtgttggatgcatctcatccagagtcttaccttgacttttcattttgaagggtctgtgatcagctgcttcaccgtcatgtgactttatgaatagagacgtgttaaagcagggatggtattcacaacatttaactagcagagtccaagcactgaccagtctgaccatcataacagagtgtggtctctgtacaggactgatggccctgggtgggtattctcccacagaaagagaaacaaacacaatacaccactcctccaacccaccacccgccaccaatcccaccacccatcccaccacacaacccaccacccatcctgacaccaatcccaacaccaattccaccaccaatcccaccaccacccaccaccaatccctccaccaatcccaccaccacccaccaccaatcccatcaccaatcccaccaccaatcccaccaccacccaccaccaatcccaccaccaatcccagcacccgtcccaccaccaatccctccaccaatcccaccaccaatcccaccaccacccaccaccacccaccaccaagcccgccaccaatcccagcacccatcccaccaccaatcccaccatcacccaccaccacccatcaccaatcccaccaccaataacaccaccagtcccaacgctacccaccaccaatcccaccaccaatcccagcacccatcccaccaccaatcccaccaccaatcccaccacccatcccaccaccaatcccaccaccaatcccaccaccaccaatcctaccaccacccaccaccaatcccaccaccaatcccaccaccaatcccaccaccacccaccaccaatcccaccaccagtcccaccaccacccaccaccaatcccaccaccaatcccaccaccacccactaccaatcccaccagcagtcctaccaccaatccctccaccaatcccaccaccacccaccaccaatcccaccaccacccaccactaatcccaccaccaatcccaccagcaatcccaccagcaataaatcaaagacttatttctcaggcccatagaaatgttacttcttgctttttgattaataaatatactaataataatttttaaaagtgagagttttgtactccgtatatttcaacatatgtaatttgatctatttcagttttattggtcaaatagtagacatgttaggtaagtcttaaaacactgaggttttggagttagacaaaacatggcttgagtgataactttgctgcttattagaggtgtggccctaggagatttgtaaatctctctgagctttattttatctaaaagataaataataatagtacctaatttgtaaggttattgggaggattaagtgacacatttaaaatgcttagtactatatgtcgaacatgaacactgctcaacaaatgtaaactatgatttctatattcaataagaagtgtagaaatggacaaagcatatgaaaaagcaaaagaaatactagaagacacttgatttttctaaaaaataaacacaaagtatttttgttttagtgaaattcatgcttagatgctgtgtactaggattgaacatacagccgccaaaatatagcagttggtggtacatgtgggtggagcaagacccctccaccttgtcaccgtgaaggggctccgccatacatgcccttgcatgtggtttaaaggtggttggcctggaagaaaaggcccaagatgggaaacagtaggtgtcttttttactaaatgtactccaatttgagaccaggaattttcattcttgaaggctcagtattgtaagtttataagagataatagacataaaagtacgatgatttcattaaaaaaaggctcctttgcacgtgatatctccgttattttttctagaatattgtgcacacatgccttgcaccacttggtgatgataaagatttctagatctttgcacagaataaggctttgctttagatcataattttggatgtacttagtatgtattcatcttttaaagaatcaatttaaattttcatactttcatatatatatacacacacacatacacaaacacacgcacacactttattttaatattttatttatttatttattgagatggaatctcactctgtcacccaggctggagtgcagtggcaggatctcggctcactgcagcctccgcctcccaggttcaagcgagtctcctgcctcatcctcccaaatttttgtattttcagtagagacggggtttcaccatgttggtcaggctggccttaaactcctggcctcaagtgatccacccgcctcggcctcccgaagtgctgggattacaggtgtgagccactgtgcccggccgtatagagatattttaaacaacactgaagtcctcctactctgcctaattagaagagcattgaaagatcagtctgacttcttgatagttctgaatttaatggagcaatgaggtgcagctttggtgaatgagcttaatttttccatgataaattgctagtctcttcccactacagtgtctctcaaaaatgggacagcaacattctttgtgttttcacttgcagtaagtaagcatgatacaattacataaatgtacacttctcagtttgttaaatagaatcttcagagattcacgtctgccgctattggtgatgaaaaatgacccgtaggaggaattaggtaggagaaaatatgtcctatgtagtatttccttcccagttctctttgaaagagagtgataggaaaaaggaacaatattgaaggaaggccttcccagtttcaaataggttttatttttctctcctaggcttcccttaccggatgtttggcgcatttatagtggcattttaaatctgtcagacattacaaaagaaacacctttctcacaaataaaagagatcattattcaccaaaactatagaatctcagaagggaatcatgatatcgccttaataaaactccaggctcctttgaattacactggtatgtagcgtatgtaagaaggcggatagcagaattgtgctggatgatattttcatatcagtttggacaagagggcagatctagagagactgttgttattttctgaccggtggagttgagggaaaggtgagggttgcatgggaagtgaagatcccacgacttgccatgaaatctcttctacgtaaagagcaagaaacgtgaattagttctttcagggaggagcacagccgcgcgcaggtgatggaaataatggacggaggagatgtctgtgccgtctgagaggcaccgggcttcttttgacaagagtagcagaactgtcattgctttgggcttagggatattagaatgtgtgaggaccagtgggactagatacatatttccaggtataatttgggtaggaaagagactgatgccgaaagaagccctggaaaggccagaacatcgtgatcagaggtgttgcctttggaggttcattgctgccaggagctgaatacccactgtatccaataacattaatggccaggcatggtggctcacccctgtaatccccacactttgggatgcccaggtgggaggattgcttgaggtcaggagtttgagatcagcctgggcaacacagtgagaccctgtctctacataaaattacaaaaaaaacaattaactgggtgtggtggtgtgcacctgtagtccaagctagtcaggaggctgagacaagaggatcatgtcagcccaggaggtcaaggctgtagtgagccaagatagtgccactgcacacaattatgtgaccttgggcaagttgctttacctctttgcacctcttaatttcctcatctgtaaaatgaggatgataatttcttcctgggtttgttgtaataatcaatacattaaagcacttcatgtctggaacagtgaagacacctgctatgactattaaggatagcatacacggaataagacgcaggaacttctaaatgcttttgaccgtagatttaggttctgagttttaagaatgtaactcaggaaattgtaacaccaaaaaggtcatgtgaaaaatggtggtgacaaattttcttgaatcaatagccttagaagttgggcagaaagcaaaaaagttattcttggtgctactctatagaaagagaagacagaaaaagaaaaagatgtatttttaaagtctatatccataactttatttgaccaaactctaatttaaaaattatgtttcagaattccaaaaaccaatatgcctaccttccaaaggtgacacaaacacaatttataccaactgttgggtaactggatggggcttctcgaaggaaaaaggtacagcatgatgctttaaatattgcttctagagtaagtcttacatgttgagatgcatggagtgggtcgttttaatcggcttctctctgaaattatatcgaacccctttatctttcctacctatttattccccaatatttattcagttattcttaaaaaacgtatttttgctttggcttgaaaaaaaaattttagggagaattttaagcatcttacttcattctaaagatcgtttgcttgacttcgcatgaaagattgtccccatctaaggctgacgagcccgtgcaagaccatctggtcctcagtgttagcagcattcccatctcccaataccatgttctcccttgatgctaatggccgggagcacaggcaggcgtgtcgcctctctctgtggccagttcttcatcttcttcttccaggcacccttcctgcaatctgaggaagcctaggaaccacttctctaacaatgcttttaaatgcttaaataaaatacacaggattacaaaagaaaccaagtgaagtgcaagacagttctcaaaatactttcaaaaagtactacaataatatatatgcctctttattaatcctctacatagcgagttattctaataccaaacctacttttgaaatagtggtgagcataaatggcattttcacttatctgccacaacagaaaagggatatgaaaatatctgtaatctctgttgatggcaaagtcataggtgccactgatactgctgtgtttgttgtctgcattcgtaatcgaagggagtggtaggcttcatctggaggtttgtgaaaacaaagactttttttctacacaaatttataagccatgtgaattctttctgaggaccttaggtttgcaattcctacttgtgggtatctggagtgttccaatcgtccttgaactttttaaaaaacagaccagtctccctttccaaaattatgttcctgatagacactatggagaataatatctgtgtcattctttacagaagaaggtagcttgccaaactctctccatctttcccgattcagtccttagttcaagtgattcacatttttagattttttactggtaatctgagacaagaagaaattaaaagtaatcttcactaagcaacgaaagctcccaacactgtcctccccatgagagatgctcgcttgcatttactcagaaacaaaagaccccaagacccctctgtcgcgaaagctcggagggcttttcagaaacgatagggctttcaattataatttggaatatatgaaacaaaaaaatgaaaagtgagaacttccaggctttggatttttgtagatgataaatataaaatgggatttctgggggactgttaccgagatgaggggatggaagaagacacggaagcaaggtctctggtcagcccagggtgctgggcttgtcccaacaccacacaggtaataagaggacagtgcagggctccgtgtctctctctctctctctctctctgtgtgtgtgtgtgtgtgtaacactaccttcctaatttttactatttgtattcaaagatacggcccttataaaaaagtacactgctctgattcacttgaaaacttatttccatatttactatttattgtgtttcctccctctgaagttatatattggttacttcacaggtgaaatccaagatattctacaaaaggtaaatattcctttggtaacaaatgaagaatgccagaaaagatatcaagattataaaataacccaacggatggtctgtgctggctataaagaagggggaaaagatgcttgtaaggtaatgcatgagattatgaaaaacacaataggctgcttgagaaaattcacttcaaaatatattttccaatagcataatttattatagtttttaaaaaaaattcagagacaaatgatctgataaatttataagcaacttttaacaaattgaatatatacaatacatatttatattattcatgatgtatgtcacaatctatgcatgtgctaatttaagagggacaaaaatacatacaataattgcactaaaatataaaaacattagatttctttgtcattgggatgatgatatcaagatttctttgttagatttatttaagaattgaagaggggatacaaaaaatgcaggcacatgagatacttggagaactttaagaaagtttgtgtgtgtgtgtgtgtgtatgtgtatgtgtgtgttgctgtgtagtggactacagaattttagaggtggtcacttatttgagtcccattgtcataactttctaccattttatttttcccctgtgactcagggagattcagggggtcccttagcttgcaaacacaatggaatgtggcgtttggtgggcatcaccagctggggcgaaggctgtgcccgcagggagcaacctggtgtctacaccaaagtcgctgagtacatggactggattttagagaaaacacagagcagtgatggaaacgctcggatgcaggcgccagcatgaggagcagcccagagtcttggcgagttttacaacctgggttcaagtcaaattctgagcctgggggtcctcatctgcaaagcatggagagtggcatctactttgcatcctgtcataaggacaaaagacagtgcactcagagctgctgaggacaatgttttgctgaagccagctttcagcattcagtaactgggagctgataatgtgaagtcgcaaccgagatctccatgattgtgtgtcgtaaaataaaatggtaaaagatcacaattagcaagtgttttcttctggttgtgaaacagaactgaaagtaagtggttgaggttctagcacagtgcctggactccctctaattgcactacttcttctggaactcagtctatctcaaagatgtaatttcctctccttgctgcacctggttagccactgaaacccacgattgtctgcttcacttgtggcaaagagctagcaggcttgggttctgttctgccgagtggaagggagaacacctgcgtcacacccactcttataagaaagagatgggttacctgaacccatagggtatatttgcctcttggcctcctaactttgctactggggcatggataggagggtccaggctgcgtgtgtggaggaactcgaggggctgcagcattgcacagccttcatggtaggcaaggaatctgctttgcaaggggcattagccctggaggctcagtggatatgggctattgcaatactaattcaaggagcatttttaggatggcacattggctcatgcctgtaattccaacaatttgggagatcacggcaggtggatctcttgagcctaggagttcaagaccagcctgggcaatgtgacaaaaccccatctctacaaaaattagctgggcgtggtggtgcatacctgtaatcccagctcccccagaagctgaggcaggaggatcacttgagtgtggctgcagtgagcagagatcgcactactgcattccagcctggacgacagagtgagactctgtctcaaaaaaaaaaggaagcattgttaggtataaattactattatttatttatttatttttgaaaggagtctcgctctgtcacccaggctgcagtgcagtggcgccatctcggctcactgcaagctccgcctcccaggttcacagcattctcctgcctcagcctcccgagtagctgggattataggtgcccgccaccacgcctggctaattttttgtatttttagtagaaacggggtttcactgtgttggccaggatggtctcgatctcctgactttgtgatccacctgccttggcctcccaaagtgctgggattacagacttgaaccaccatgcccggccctgttaggtataaactatttcataaaattcagacttgtaaatttatcatagcctttagaatggatgatagaaatccttatgccacacaaattcctcatatgccagggctcaccataactgataccagctcacttgattcagctcagtttaacatttacacagaattggccatttacaaaatcttacataagttaagtagaaaaatagaaaagtgaggttttctgaaagagtttgggtttttccttcaatgctcaacaacagaggtccccaatctttctggcaccagagaccagttttgtgcaagacactttttccatgaaccagcgtggtgggggggggatgattctggaatgattcaagtgcatgacatttattgtg

SEQ ID NO: 19 - skipped

SEQ ID NO: 20 - DNA, 23 bp, synthetic construct
  source 1..23: mol_type = other DNA
ccaaaaaaggtgcaccagtaaca

SEQ ID NO: 21 - DNA, 24 bp, synthetic construct
  source 1..24: mol_type = other DNA
cctccgggactgtactttaatagg

SEQ ID NO: 22 - DNA, 29 bp, synthetic construct
  source 1..29: mol_type = other DNA
cacgcaaacatttcacaaggcagagtacc

SEQ ID NO: 23 - DNA, 20 bp, synthetic construct
  source 1..20: mol_type = other DNA
cctgtgtggagggtcactca

SEQ ID NO: 24 - DNA, 23 bp, synthetic construct
  source 1..23: mol_type = other DNA
ccactatagatgcgccaaacatc

SEQ ID NO: 25 - DNA, 23 bp, synthetic construct
  source 1..23: mol_type = other DNA
cccactgctttgatgggcttccc

SEQ ID NO: 26-29 - skipped (4 entries)

SEQ ID NO: 30 - DNA, 20 bp, synthetic construct
  source 1..20: mol_type = other DNA
aacggtcttcaagctgttct

SEQ ID NO: 31 - DNA, 20 bp, synthetic construct
  source 1..20: mol_type = other DNA
aaatgaacggtcttcaagct

SEQ ID NO: 32 - DNA, 20 bp, synthetic construct
  source 1..20: mol_type = other DNA
cttaaaaatgaacggtcttc

SEQ ID NO: 33 - DNA, 20 bp, synthetic construct
  source 1..20: mol_type = other DNA
tgtcacttaaaaatgaacgg

SEQ ID NO: 34 - DNA, 20 bp, synthetic construct
  source 1..20: mol_type = other DNA
tggaggtgagtctcttgtca

SEQ ID NO: 35 - DNA, 20 bp, synthetic construct
  source 1..20: mol_type = other DNA
cttcttggaggtgagtctct

SEQ ID NO: 36 - DNA, 20 bp, synthetic construct
  source 1..20: mol_type = other DNA
gcttgaataaaatcattctg

SEQ ID NO: 37 - DNA, 20 bp, synthetic construct
  source 1..20: mol_type = other DNA
tgcttgcttgaataaaatca

SEQ ID NO: 38 - DNA, 20 bp, synthetic construct
  source 1..20: mol_type = other DNA
taagttgcttgcttgaataa

SEQ ID NO: 39 - DNA, 20 bp, synthetic construct
  source 1..20: mol_type = other DNA
ggaaatgaaataagttgctt

SEQ ID NO: 40 - DNA, 20 bp, synthetic construct
  source 1..20: mol_type = other DNA
aacaaggaaatgaaataagt

SEQ ID NO: 41 - DNA, 20 bp, synthetic construct
  source 1..20: mol_type = other DNA
tagcaaacaaggaaatgaaa

SEQ ID NO: 42 - DNA, 20 bp, synthetic construct
  source 1..20: mol_type = other DNA
aactgtagcaaacaaggaaa

SEQ ID NO: 43 - DNA, 20 bp, synthetic construct
  source 1..20: mol_type = other DNA
caggaaactgtagcaaacaa

SEQ ID NO: 44 - DNA, 20 bp, synthetic construct
  source 1..20: mol_type = other DNA
atccacaggaaactgtagca

SEQ ID NO: 45 - DNA, 20 bp, synthetic construct
  source 1..20: mol_type = other DNA
cagacatccacaggaaactg

SEQ ID NO: 46 - DNA, 20 bp, synthetic construct
  source 1..20: mol_type = other DNA
atccccacctctgaagaagg

SEQ ID NO: 47 - DNA, 20 bp, synthetic construct
  source 1..20: mol_type = other DNA
tacatccccacctctgaaga

SEQ ID NO: 48 - DNA, 20 bp, synthetic construct
  source 1..20: mol_type = other DNA
gaagctacatccccacctct

SEQ ID NO: 49 - DNA, 20 bp, synthetic construct
  source 1..20: mol_type = other DNA
acatggaagctacatcccca

SEQ ID NO: 50 - DNA, 20 bp, synthetic construct
  source 1..20: mol_type = other DNA
ggtgtacatggaagctacat

SEQ ID NO: 51 - DNA, 20 bp, synthetic construct
  source 1..20: mol_type = other DNA
accttgggtggaatgtgcac

SEQ ID NO: 52 - DNA, 20 bp, synthetic construct
  source 1..20: mol_type = other DNA
caaacaccttgggtggaatg

SEQ ID NO: 53 - DNA, 20 bp, synthetic construct
  source 1..20: mol_type = other DNA
ctgaatagcaaacaccttgg

SEQ ID NO: 54 - DNA, 20 bp, synthetic construct
  source 1..20: mol_type = other DNA
gaaaactgaatagcaaacac

SEQ ID NO: 55 - DNA, 20 bp, synthetic construct
  source 1..20: mol_type = other DNA
tggaagaaaactgaatagca

SEQ ID NO: 56 - DNA, 20 bp, synthetic construct
  source 1..20: mol_type = other DNA
caaaccttttctccatgtca

SEQ ID NO: 57 - DNA, 20 bp, synthetic construct
  source 1..20: mol_type = other DNA
acactatctttcaagaagca

SEQ ID NO: 58 - DNA, 20 bp, synthetic construct
  source 1..20: mol_type = other DNA
ggcaagcacttatttgatga

SEQ ID NO: 59 - DNA, 20 bp, synthetic construct
  source 1..20: mol_type = other DNA
ttaaaattgactcctctcat

SEQ ID NO: 60 - DNA, 20 bp, synthetic construct
  source 1..20: mol_type = other DNA
tcaacactgctaaccttaga

SEQ ID NO: 61 - DNA, 20 bp, synthetic construct
  source 1..20: mol_type = other DNA
attcttcaacactgctaacc

SEQ ID NO: 62 - DNA, 20 bp, synthetic construct
  source 1..20: mol_type = other DNA
ttggcattcttcaacactgc

SEQ ID NO: 63 - DNA, 20 bp, synthetic construct
  source 1..20: mol_type = other DNA
ccttttttggcattcttcaa

SEQ ID NO: 64 - DNA, 20 bp, synthetic construct
  source 1..20: mol_type = other DNA
tggtgcaccttttttggcat

SEQ ID NO: 65 - DNA, 20 bp, synthetic construct
  source 1..20: mol_type = other DNA
cttcagtgagaatccagatt

SEQ ID NO: 66 - DNA, 20 bp, synthetic construct
  source 1..20: mol_type = other DNA
ggcacagggcttcagtgaga

SEQ ID NO: 67 - DNA, 20 bp, synthetic construct
  source 1..20: mol_type = other DNA
aatttctgaaagggcacagg

SEQ ID NO: 68 - DNA, 20 bp, synthetic construct
  source 1..20: mol_type = other DNA
caaccaatttctgaaagggc

SEQ ID NO: 69 - DNA, 20 bp, synthetic construct
  source 1..20: mol_type = other DNA
caagatgctggaagatgttc

SEQ ID NO: 70 - DNA, 20 bp, synthetic construct
  source 1..20: mol_type = other DNA
gtgccactttcagatgtttt

SEQ ID NO: 71 - DNA, 20 bp, synthetic construct
  source 1..20: mol_type = other DNA
ttggtgtgccactttcagat

SEQ ID NO: 72 - DNA, 20 bp, synthetic construct
  source 1..20: mol_type = other DNA
ggaacttggtgtgccacttt

SEQ ID NO: 73 - DNA, 20 bp, synthetic construct
  source 1..20: mol_type = other DNA
gtagaggaacttggtgtgcc

SEQ ID NO: 74 - DNA, 20 bp, synthetic construct
  source 1..20: mol_type = other DNA
gaggagtagaggaacttggt

SEQ ID NO: 75 - DNA, 20 bp, synthetic construct
  source 1..20: mol_type = other DNA
ttcttgaggagtagaggaac

SEQ ID NO: 76 - DNA, 20 bp, synthetic construct
  source 1..20: mol_type = other DNA
gtgttttcttgaggagtaga

SEQ ID NO: 77 - DNA, 20 bp, synthetic construct
  source 1..20: mol_type = other DNA
atatggtgttttcttgagga

SEQ ID NO: 78 - DNA, 20 bp, synthetic construct
  source 1..20: mol_type = other DNA
tccagatatggtgttttctt

SEQ ID NO: 79 - DNA, 20 bp, synthetic construct
  source 1..20: mol_type = other DNA
ctatatccagatatggtgtt

SEQ ID NO: 80 - DNA, 20 bp, synthetic construct
  source 1..20: mol_type = other DNA
ggttaaaaggctatatccag

SEQ ID NO: 81 - DNA, 20 bp, synthetic construct
  source 1..20: mol_type = other DNA
ttgcaggttaaaaggctata

SEQ ID NO: 82 - DNA, 20 bp, synthetic construct
  source 1..20: mol_type = other DNA
ttcttttgcaggttaaaagg

SEQ ID NO: 83 - DNA, 20 bp, synthetic construct
  source 1..20: mol_type = other DNA
taaagttcttttgcaggtta

SEQ ID NO: 84 - DNA, 20 bp, synthetic construct
  source 1..20: mol_type = other DNA
atggcagggttcaggtaaag

SEQ ID NO: 85 - DNA, 20 bp, synthetic construct
  source 1..20: mol_type = other DNA
ttagaatggcagggttcagg

SEQ ID NO: 86 - DNA, 20 bp, synthetic construct
  source 1..20: mol_type = other DNA
aaattttagaatggcagggt

SEQ ID NO: 87 - DNA, 20 bp, synthetic construct
  source 1..20: mol_type = other DNA
cgggtaaattttagaatggc

SEQ ID NO: 88 - DNA, 20 bp, synthetic construct
  source 1..20: mol_type = other DNA
actcccgggtaaattttaga

SEQ ID NO: 89 - DNA, 20 bp, synthetic construct
  source 1..20: mol_type = other DNA
tccaaagtcaactcccgggt

SEQ ID NO: 90 - DNA, 20 bp, synthetic construct
  source 1..20: mol_type = other DNA
tctcctccaaagtcaactcc

SEQ ID NO: 91 - DNA, 20 bp, synthetic construct
  source 1..20: mol_type = other DNA
attcttctcctccaaagtca

SEQ ID NO: 92 - DNA, 20 bp, synthetic construct
  source 1..20: mol_type = other DNA
attcaattcttctcctccaa

SEQ ID NO: 93 - DNA, 20 bp, synthetic construct
  source 1..20: mol_type = other DNA
gtcacattcaattcttctcc

SEQ ID NO: 94 - DNA, 20 bp, synthetic construct
  source 1..20: mol_type = other DNA
caaacattcactcctttaac

SEQ ID NO: 95 - DNA, 20 bp, synthetic construct
  source 1..20: mol_type = other DNA
cttggcaaacattcactcct

SEQ ID NO: 96 - DNA, 20 bp, synthetic construct
  source 1..20: mol_type = other DNA
agtctcttggcaaacattca

SEQ ID NO: 97 - DNA, 20 bp, synthetic construct
  source 1..20: mol_type = other DNA
tgacagcgaatcatctttgt

SEQ ID NO: 98 - DNA, 20 bp, synthetic construct
  source 1..20: mol_type = other DNA
aaaactgacagcgaatcatc

SEQ ID NO: 99 - DNA, 20 bp, synthetic construct
  source 1..20: mol_type = other DNA
agtgaaaaactgacagcgaa

SEQ ID NO: 100 - DNA, 20 bp, synthetic construct
  source 1..20: mol_type = other DNA
cagtcttctgggagtaaaga

SEQ ID NO: 101 - DNA, 20 bp, synthetic construct
  source 1..20: mol_type = other DNA
aagaaacacttacacttctc

SEQ ID NO: 102 - DNA, 20 bp, synthetic construct
  source 1..20: mol_type = other DNA
agataatcttaagaaacact

SEQ ID NO: 103 - DNA, 20 bp, synthetic construct
  source 1..20: mol_type = other DNA
gagctcccttgtgtcccata

SEQ ID NO: 104 - DNA, 20 bp, synthetic construct
  source 1..20: mol_type = other DNA
aaccagagctcccttgtgtc

SEQ ID NO: 105 - DNA, 20 bp, synthetic construct
  source 1..20: mol_type = other DNA
agagtaaccagagctccctt

SEQ ID NO: 106 - DNA, 20 bp, synthetic construct
  source 1..20: mol_type = other DNA
ctcaaagagtaaccagagct

SEQ ID NO: 107 - DNA, 20 bp, synthetic construct
  source 1..20: mol_type = other DNA
gcttgtttttgttgtgcaga

SEQ ID NO: 108 - DNA, 20 bp, synthetic construct
  source 1..20: mol_type = other DNA
acccaacagttggtataaat

SEQ ID NO: 109 - DNA, 20 bp, synthetic construct
  source 1..20: mol_type = other DNA
aggcatattggtttttggaa

SEQ ID NO: 110 - DNA, 20 bp, synthetic construct
  source 1..20: mol_type = other DNA
aacacaattgcttcttggag

SEQ ID NO: 111 - DNA, 20 bp, synthetic construct
  source 1..20: mol_type = other DNA
tgctggaagatgttcatgtg

SEQ ID NO: 112 - DNA, 20 bp, synthetic construct
  source 1..20: mol_type = other DNA
tttgttcctccaacaatgcg

SEQ ID NO: 113 - DNA, 20 bp, synthetic construct
  source 1..20: mol_type = other DNA
aagagtttgttcctccaaca

SEQ ID NO: 114 - DNA, 20 bp, synthetic construct
  source 1..20: mol_type = other DNA
ccaagaagagtttgttcctc

SEQ ID NO: 115 - DNA, 20 bp, synthetic construct
  source 1..20: mol_type = other DNA
tctccccaagaagagtttgt

SEQ ID NO: 116 - DNA, 20 bp, synthetic construct
  source 1..20: mol_type = other DNA
ccagggccactctccccaag

SEQ ID NO: 117 - DNA, 20 bp, synthetic construct
  source 1..20: mol_type = other DNA
agcttcacctgcaggctcac

SEQ ID NO: 118 - DNA, 20 bp, synthetic construct
  source 1..20: mol_type = other DNA
tatgagtgaccctccacaca

SEQ ID NO: 119 - DNA, 20 bp, synthetic construct
  source 1..20: mol_type = other DNA
tgtcctatgagtgaccctcc

SEQ ID NO: 120 - DNA, 20 bp, synthetic construct
  source 1..20: mol_type = other DNA
actggtgtcctatgagtgac

SEQ ID NO: 121 - DNA, 20 bp, synthetic construct
  source 1..20: mol_type = other DNA
gacccactggtgtcctatga

SEQ ID NO: 122 - DNA, 20 bp, synthetic construct
  source 1..20: mol_type = other DNA
gtgaggacccactggtgtcc

SEQ ID NO: 123 - DNA, 20 bp, synthetic construct
  source 1..20: mol_type = other DNA
aagcccatcaaagcagtggg

SEQ ID NO: 124 - DNA, 20 bp, synthetic construct
  source 1..20: mol_type = other DNA
gtctgacagatttaaaatgc

SEQ ID NO: 125 - DNA, 20 bp, synthetic construct
  source 1..20: mol_type = other DNA
gtaatgtctgacagatttaa

SEQ ID NO: 126 - DNA, 20 bp, synthetic construct
  source 1..20: mol_type = other DNA
cttttgtaatgtctgacaga

SEQ ID NO: 127 - DNA, 20 bp, synthetic construct
  source 1..20: mol_type = other DNA
tttatttgtgagaaaggtgt

SEQ ID NO: 128 - DNA, 20 bp, synthetic construct
  source 1..20: mol_type = other DNA
tctcttttatttgtgagaaa

SEQ ID NO: 129 - DNA, 20 bp, synthetic construct
  source 1..20: mol_type = other DNA
atcatgattcccttctgaga

SEQ ID NO: 130 - DNA, 20 bp, synthetic construct
  source 1..20: mol_type = other DNA
aaaggagcctggagttttat

SEQ ID NO: 131 - DNA, 20 bp, synthetic construct
  source 1..20: mol_type = other DNA
aattcaaaggagcctggagt

SEQ ID NO: 132 - DNA, 20 bp, synthetic construct
  source 1..20: mol_type = other DNA
agtgtaattcaaaggagcct

SEQ ID NO: 133 - DNA, 20 bp, synthetic construct
  source 1..20: mol_type = other DNA
aattcagtgtaattcaaagg

SEQ ID NO: 134 - DNA, 20 bp, synthetic construct
  source 1..20: mol_type = other DNA
tttggaattcagtgtaattc

SEQ ID NO: 135 - DNA, 20 bp, synthetic construct
  source 1..20: mol_type = other DNA
tggtttttggaattcagtgt

SEQ ID NO: 136 - DNA, 20 bp, synthetic construct
  source 1..20: mol_type = other DNA
attggtttttggaattcagt

SEQ ID NO: 137 - DNA, 20 bp, synthetic construct
  source 1..20: mol_type = other DNA
catattggtttttggaattc

SEQ ID NO: 138 - DNA, 20 bp, synthetic construct
  source 1..20: mol_type = other DNA
gtaggcatattggtttttgg

SEQ ID NO: 139 - DNA, 20 bp, synthetic construct
  source 1..20: mol_type = other DNA
gtgtcacctttggaaggtag

SEQ ID NO: 140 - DNA, 20 bp, synthetic construct
  source 1..20: mol_type = other DNA
aacagttggtataaattgtg

SEQ ID NO: 141 - DNA, 20 bp, synthetic construct
  source 1..20: mol_type = other DNA
caacagttggtataaattgt

SEQ ID NO: 142 - DNA, 20 bp, synthetic construct
  source 1..20: mol_type = other DNA
tacccaacagttggtataaa

SEQ ID NO: 143 - DNA, 20 bp, synthetic construct
  source 1..20: mol_type = other DNA
tccttcgagaagccccatcc

SEQ ID NO: 144 - DNA, 20 bp, synthetic construct
  source 1..20: mol_type = other DNA
aaaggaatatttaccttttg

SEQ ID NO: 145 - DNA, 20 bp, synthetic construct
  source 1..20: mol_type = other DNA
ttaccaaaggaatatttacc

SEQ ID NO: 146 - DNA, 20 bp, synthetic construct
  source 1..20: mol_type = other DNA
atttgttaccaaaggaatat

SEQ ID NO: 147 - DNA, 20 bp, synthetic construct
  source 1..20: mol_type = other DNA
ggcattcttcatttgttacc

SEQ ID NO: 148 - DNA, 20 bp, synthetic construct
  source 1..20: mol_type = other DNA
tttctggcattcttcatttg

SEQ ID NO: 149 - DNA, 20 bp, synthetic construct
  source 1..20: mol_type = other DNA
gatatcttttctggcattct

SEQ ID NO: 150 - DNA, 20 bp, synthetic construct
  source 1..20: mol_type = other DNA
atcttgatatcttttctggc

SEQ ID NO: 151 - DNA, 20 bp, synthetic construct
  source 1..20: mol_type = other DNA
ttataatcttgatatctttt

SEQ ID NO: 152 - DNA, 20 bp, synthetic construct
  source 1..20: mol_type = other DNA
ttattttataatcttgatat

SEQ ID NO: 153 - DNA, 20 bp, synthetic construct
  source 1..20: mol_type = other DNA
ttgggttattttataatctt

SEQ ID NO: 154 - DNA, 20 bp, synthetic construct
  source 1..20: mol_type = other DNA
atccgttgggttattttata

SEQ ID NO: 155 - DNA, 20 bp, synthetic construct
  source 1..20: mol_type = other DNA
agaccatccgttgggttatt

SEQ ID NO: 156 - DNA, 20 bp, synthetic construct
  source 1..20: mol_type = other DNA
agcacagaccatccgttggg

SEQ ID NO: 157 - DNA, 20 bp, synthetic construct
  source 1..20: mol_type = other DNA
ctttatagccagcacagacc

SEQ ID NO: 158 - DNA, 20 bp, synthetic construct
  source 1..20: mol_type = other DNA
cccttctttatagccagcac

SEQ ID NO: 159 - DNA, 20 bp, synthetic construct
  source 1..20: mol_type = other DNA
tttcccccttctttatagcc

SEQ ID NO: 160 - DNA, 20 bp, synthetic construct
  source 1..20: mol_type = other DNA
catcttttcccccttcttta

SEQ ID NO: 161 - DNA, 20 bp, synthetic construct
  source 1..20: mol_type = other DNA
cccttacaagcatcttttcc

SEQ ID NO: 162 - DNA, 20 bp, synthetic construct
  source 1..20: mol_type = other DNA
acattccattgtgtttgcaa

SEQ ID NO: 163 - DNA, 20 bp, synthetic construct
  source 1..20: mol_type = other DNA
tggtgatgcccaccaaacgc

SEQ ID NO: 164 - DNA, 20 bp, synthetic construct
  source 1..20: mol_type = other DNA
tgctccctgcgggcacagcc

SEQ ID NO: 165 - DNA, 20 bp, synthetic construct
  source 1..20: mol_type = other DNA
caggttgctccctgcgggca

SEQ ID NO: 166 - DNA, 20 bp, synthetic construct
  source 1..20: mol_type = other DNA
gacaccaggttgctccctgc

SEQ ID NO: 167 - DNA, 20 bp, synthetic construct
  source 1..20: mol_type = other DNA
gtgtagacaccaggttgctc

SEQ ID NO: 168 - DNA, 20 bp, synthetic construct
  source 1..20: mol_type = other DNA
ctttggtgtagacaccaggt

SEQ ID NO: 169 - DNA, 20 bp, synthetic construct
  source 1..20: mol_type = other DNA
agcgactttggtgtagacac

SEQ ID NO: 170 - DNA, 20 bp, synthetic construct
  source 1..20: mol_type = other DNA
tactcagcgactttggtgta

SEQ ID NO: 171 - DNA, 20 bp, synthetic construct
  source 1..20: mol_type = other DNA
ccatgtactcagcgactttg

SEQ ID NO: 172 - DNA, 20 bp, synthetic construct
  source 1..20: mol_type = other DNA
ccagtccatgtactcagcga

SEQ ID NO: 173 - DNA, 20 bp, synthetic construct
  source 1..20: mol_type = other DNA
ctgtgttttctctaaaatcc

SEQ ID NO: 174 - DNA, 20 bp, synthetic construct
  source 1..20: mol_type = other DNA
ctgctctgtgttttctctaa

SEQ ID NO: 175 - DNA, 20 bp, synthetic construct
  source 1..20: mol_type = other DNA
gctcagaatttgacttgaac

SEQ ID NO: 176 - DNA, 20 bp, synthetic construct
  source 1..20: mol_type = other DNA
cccaggctcagaatttgact

SEQ ID NO: 177 - DNA, 20 bp, synthetic construct
  source 1..20: mol_type = other DNA
ctttgcagatgaggaccccc

SEQ ID NO: 178 - DNA, 20 bp, synthetic construct
  source 1..20: mol_type = other DNA
ccatgctttgcagatgagga

SEQ ID NO: 179 - DNA, 20 bp, synthetic construct
  source 1..20: mol_type = other DNA
actctccatgctttgcagat

SEQ ID NO: 180 - DNA, 20 bp, synthetic construct
  source 1..20: mol_type = other DNA
atgccactctccatgctttg

SEQ ID NO: 181 - DNA, 20 bp, synthetic construct
  source 1..20: mol_type = other DNA
agcagctctgagtgcactgt

SEQ ID NO: 182 - DNA, 20 bp, synthetic construct
  source 1..20: mol_type = other DNA
tcctcagcagctctgagtgc

SEQ ID NO: 183 - DNA, 20 bp, synthetic construct
  source 1..20: mol_type = other DNA
cattgtcctcagcagctctg

SEQ ID NO: 184 - DNA, 20 bp, synthetic construct
  source 1..20: mol_type = other DNA
tggtttttggaattctgaaa

SEQ ID NO: 185 - DNA, 20 bp, synthetic construct
  source 1..20: mol_type = other DNA
atattggtttttggaattct

SEQ ID NO: 186 - DNA, 20 bp, synthetic construct
  source 1..20: mol_type = other DNA
tgtactagtttcctataact

SEQ ID NO: 187 - DNA, 20 bp, synthetic construct
  source 1..20: mol_type = other DNA
atagggacacaaccaaggaa

SEQ ID NO: 188 - DNA, 20 bp, synthetic construct
  source 1..20: mol_type = other DNA
aggcacagagccagcaccca

SEQ ID NO: 189 - DNA, 20 bp, synthetic construct
  source 1..20: mol_type = other DNA
cctgcctcctggcagccttc

SEQ ID NO: 190 - DNA, 20 bp, synthetic construct
  source 1..20: mol_type = other DNA
ccaggtgtggacagcagctg

SEQ ID NO: 191 - DNA, 20 bp, synthetic construct
  source 1..20: mol_type = other DNA
ggttttgtttgtaaaattag

SEQ ID NO: 192 - DNA, 20 bp, synthetic construct
  source 1..20: mol_type = other DNA
aaaacaccattaaatccatt

SEQ ID NO: 193 - DNA, 20 bp, synthetic construct
  source 1..20: mol_type = other DNA
acagaaaccatgatgttgct

SEQ ID NO: 194 - DNA, 20 bp, synthetic construct
  source 1..20: mol_type = other DNA
tcagcccaatgtcctaacct

SEQ ID NO: 195 - DNA, 20 bp, synthetic construct
  source 1..20: mol_type = other DNA
ccttcactgactctcttttc

SEQ ID NO: 196 - DNA, 20 bp, synthetic construct
  source 1..20: mol_type = other DNA
ttctcctggctcagaagctc

SEQ ID NO: 197 - DNA, 20 bp, synthetic construct
  source 1..20: mol_type = other DNA
gaatgtcaggcctctgggcc

SEQ ID NO: 198 - DNA, 20 bp, synthetic construct
  source 1..20: mol_type = other DNA
ctaacaaccccacaatatca

SEQ ID NO: 199 - DNA, 20 bp, synthetic construct
  source 1..20: mol_type = other DNA
cccaattcttagtcctttaa

SEQ ID NO: 200 - DNA, 20 bp, synthetic construct
  source 1..20: mol_type = other DNA
accaagctcagcctccaact

SEQ ID NO: 201 - DNA, 20 bp, synthetic construct
  source 1..20: mol_type = other DNA
ttattagtcaaatcacccaa

SEQ ID NO: 202 - DNA, 20 bp, synthetic construct
  source 1..20: mol_type = other DNA
tggatgggtagaggcctttc

SEQ ID NO: 203 - DNA, 20 bp, synthetic construct
  source 1..20: mol_type = other DNA
ccccctcccttccctacaca

SEQ ID NO: 204 - DNA, 20 bp, synthetic construct
  source 1..20: mol_type = other DNA
atgtaagttacaagccacta

SEQ ID NO: 205 - DNA, 20 bp, synthetic construct
  source 1..20: mol_type = other DNA
tgcctctttaataaaaactc

SEQ ID NO: 206 - DNA, 20 bp, synthetic construct
  source 1..20: mol_type = other DNA
actcattgccttaactcagg

SEQ ID NO: 207 - DNA, 20 bp, synthetic construct
  source 1..20: mol_type = other DNA
acttgaccttactgttttag

SEQ ID NO: 208 - DNA, 20 bp, synthetic construct
  source 1..20: mol_type = other DNA
ctcctccccaggctgctcct

SEQ ID NO: 209 - DNA, 20 bp, synthetic construct
  source 1..20: mol_type = other DNA
aagatctagataattcttgt

SEQ ID NO: 210 - DNA, 20 bp, synthetic construct
  source 1..20: mol_type = other DNA
tcaactcacacctgacctaa

SEQ ID NO: 211 - DNA, 20 bp, synthetic construct
  source 1..20: mol_type = other DNA
tgaacccaaaactctggcac

SEQ ID NO: 212 - DNA, 20 bp, synthetic construct
  source 1..20: mol_type = other DNA
agcccaaggaacatctcacc

SEQ ID NO: 213 - DNA, 20 bp, synthetic construct
  source 1..20: mol_type = other DNA
gcctgtttggtggtctcttc

SEQ ID NO: 214 - DNA, 20 bp, synthetic construct
  source 1..20: mol_type = other DNA
cttctcctggctcagaagct

SEQ ID NO: 215 - DNA, 20 bp, synthetic construct
  source 1..20: mol_type = other DNA
atgtatgattctaagaactt

SEQ ID NO: 216 - DNA, 20 bp, synthetic construct
  source 1..20: mol_type = other DNA
aacagacacattatttatat

SEQ ID NO: 217 - DNA, 20 bp, synthetic construct
  source 1..20: mol_type = other DNA
agagtcaagtccacagacat

SEQ ID NO: 218 - DNA, 20 bp, synthetic construct
  source 1..20: mol_type = other DNA
tcctaaataggaacaaagta

SEQ ID NO: 219 - DNA, 20 bp, synthetic construct
  source 1..20: mol_type = other DNA
ttgttaaggttgtagagaga

SEQ ID NO: 220 - DNA, 20 bp, synthetic construct
  source 1..20: mol_type = other DNA
acccaattatttttaatggc

SEQ ID NO: 221 - DNA, 20 bp, synthetic construct
  source 1..20: mol_type = other DNA
gcctaaatgtaagagctaaa

SEQ ID NO: 222 - DNA, 20 bp, synthetic construct
  source 1..20: mol_type = other DNA
taaactcttacatttataga

SEQ ID NO: 223 - DNA, 20 bp, synthetic construct
  source 1..20: mol_type = other DNA
aaataaaagcactcagactg

SEQ ID NO: 224 - DNA, 20 bp, synthetic construct
  source 1..20: mol_type = other DNA
ttggtctacagattcaatgc

SEQ ID NO: 225 - DNA, 20 bp, synthetic construct
  source 1..20: mol_type = other DNA
taacaaaaatgccttgtgcc

SEQ ID NO: 226 - DNA, 20 bp, synthetic construct
  source 1..20: mol_type = other DNA
tcccagctccagtcaccacc

SEQ ID NO: 227 - DNA, 20 bp, synthetic construct
  source 1..20: mol_type = other DNA
gtactaaacatcctaagtga

SEQ ID NO: 228 - DNA, 20 bp, synthetic construct
  source 1..20: mol_type = other DNA
actcgcctttgtgactcgat

SEQ ID NO: 229 - DNA, 20 bp, synthetic construct
  source 1..20: mol_type = other DNA
ttttgaatcttcattcaaag

SEQ ID NO: 230 - DNA, 20 bp, synthetic construct
  source 1..20: mol_type = other DNA
cagagccttgatcagaataa

SEQ ID NO: 231 - DNA, 20 bp, synthetic construct
  source 1..20: mol_type = other DNA
aagttccaccttctaactgg

SEQ ID NO: 232 - DNA, 20 bp, synthetic construct
  source 1..20: mol_type = other DNA
agcagctcacacccaaaaag

SEQ ID NO: 233 - DNA, 20 bp, synthetic construct
  source 1..20: mol_type = other DNA
ttctgtgtcaattataaaca

SEQ ID NO: 234 - DNA, 20 bp, synthetic construct
  source 1..20: mol_type = other DNA
tagaaagagtaagccttcac

SEQ ID NO: 235 - DNA, 20 bp, synthetic construct
  source 1..20: mol_type = other DNA
agtgaggttactcaccagag

SEQ ID NO: 236 - DNA, 20 bp, synthetic construct
  source 1..20: mol_type = other DNA
ttttgttgtgcagactgaaa

SEQ ID NO: 237 - DNA, 20 bp, synthetic construct
  source 1..20: mol_type = other DNA
ttacccatcaaagcagtggg

SEQ ID NO: 238 - DNA, 20 bp, synthetic construct
  source 1..20: mol_type = other DNA
aatgttgtgaataccatccc

SEQ ID NO: 239 - DNA, 20 bp, synthetic construct
  source 1..20: mol_type = other DNA
taacatttctatgggcctga

SEQ ID NO: 240 - DNA, 20 bp, synthetic construct
  source 1..20: mol_type = other DNA
tgtctactatttgaccaata

SEQ ID NO: 241 - DNA, 20 bp, synthetic construct
  source 1..20: mol_type = other DNA
tttaaatgtgtcacttaatc

SEQ ID NO: 242 - DNA, 20 bp, synthetic construct
  source 1..20: mol_type = other DNA
tcactaaaacaaaaatactt

SEQ ID NO: 243 - DNA, 20 bp, synthetic construct
  source 1..20: mol_type = other DNA
tcttccaggccaaccacctt

SEQ ID NO: 244 - DNA, 20 bp, synthetic construct
  source 1..20: mol_type = other DNA
tgcaaggcatgtgtgcacaa

SEQ ID NO: 245 - DNA, 20 bp, synthetic construct
  source 1..20: mol_type = other DNA
tgtttaaaatatctctatac

SEQ ID NO: 246 - DNA, 20 bp, synthetic construct
  source 1..20: mol_type = other DNA
catggaaaaattaagctcat

SEQ ID NO: 247 - DNA, 20 bp, synthetic construct
  source 1..20: mol_type = other DNA
tgaagattctatttaacaaa

SEQ ID NO: 248 - DNA, 20 bp, synthetic construct
  source 1..20: mol_type = other DNA
gcctaggagagaaaaataaa

SEQ ID NO: 249 - DNA, 20 bp, synthetic construct
  source 1..20: mol_type = other DNA
ccagtgtaattcaaaggagc

SEQ ID NO: 250 - DNA, 20 bp, synthetic construct
  source 1..20: mol_type = other DNA
ccattatttccatcacctgc

SEQ ID NO: 251 - DNA, 20 bp, synthetic construct
  source 1..20: mol_type = other DNA
tacccaaattatacctggaa

SEQ ID NO: 252 - DNA, 20 bp, synthetic construct
  source 1..20: mol_type = other DNA
agaggtaaagcaacttgccc

SEQ ID NO: 253 - DNA, 20 bp, synthetic construct
  source 1..20: mol_type = other DNA
tccttaatagtcatagcagg

SEQ ID NO: 254 - DNA, 20 bp, synthetic construct
  source 1..20: mol_type = other DNA
tcaccaccatttttcacatg

SEQ ID NO: 255 - DNA, 20 bp, synthetic construct
  source 1..20: mol_type = other DNA
gttatggatatagactttaa

SEQ ID NO: 256 - DNA, 20 bp, synthetic construct
  source 1..20: mol_type = other DNA
ctagaagcaatatttaaagc

SEQ ID NO: 257 - DNA, 20 bp, synthetic construct
  source 1..20: mol_type = other DNA
atgaagtaagatgcttaaaa

SEQ ID NO: 258 - DNA, 20 bp, synthetic construct
  source 1..20: mol_type = other DNA
cttcttgtctcagattacca

SEQ ID NO: 259 - DNA, 20 bp, synthetic construct
  source 1..20: mol_type = other DNA
tctgaaaagccctccgagct

SEQ ID NO: 260 - DNA, 20 bp, synthetic construct
  source 1..20: mol_type = other DNA
aagtgaatcagagcagtgta

SEQ ID NO: 261 - DNA, 20 bp, synthetic construct
  source 1..20: mol_type = other DNA
accttacaagcatcttttcc

SEQ ID NO: 262 - DNA, 20 bp, synthetic construct
  source 1..20: mol_type = other DNA
atttgttaaaagttgcttat

SEQ ID NO: 263 - DNA, 20 bp, synthetic construct
  source 1..20: mol_type = other DNA
tgatatcatcatcccaatga

SEQ ID NO: 264 - DNA, 20 bp, synthetic construct
  source 1..20: mol_type = other DNA
cagacaccttcttcacaagg

SEQ ID NO: 265 - DNA, 20 bp, synthetic construct
  source 1..20: mol_type = other DNA
aatttcccagatgtattagt

SEQ ID NO: 266 - DNA, 20 bp, synthetic construct
  source 1..20: mol_type = other DNA
tcagcagaaatcatgtaggc

SEQ ID NO: 267 - DNA, 20 bp, synthetic construct
  source 1..20: mol_type = other DNA
ttaaatataaagagatcctc

SEQ ID NO: 268 - DNA, 20 bp, synthetic construct
  source 1..20: mol_type = other DNA
gtaataaaaggaatgataaa

SEQ ID NO: 269 - DNA, 20 bp, synthetic construct
  source 1..20: mol_type = other DNA
agacagtaaacaaaatcagg

SEQ ID NO: 270 - DNA, 20 bp, synthetic construct
  source 1..20: mol_type = other DNA
caagaaaccaccaaaggaag

SEQ ID NO: 271 - DNA, 20 bp, synthetic construct
  source 1..20: mol_type = other DNA
accccaacagacagcccacc

SEQ ID NO: 272 - DNA, 20 bp, synthetic construct
  source 1..20: mol_type = other DNA
tgggctcaccccagtggacc

SEQ ID NO: 273 - DNA, 20 bp, synthetic construct
  source 1..20: mol_type = other DNA
gcctggcccccaagactcta

SEQ ID NO: 274 - DNA, 20 bp, synthetic construct
  source 1..20: mol_type = other DNA
aggcctgccacaggccagac

SEQ ID NO: 275 - DNA, 20 bp, synthetic construct
  source 1..20: mol_type = other DNA
ttcaagcctgggcagcacag

SEQ ID NO: 276 - DNA, 20 bp, synthetic construct
  source 1..20: mol_type = other DNA
aaaataacttcactagagct

SEQ ID NO: 277 - DNA, 20 bp, synthetic construct
  source 1..20: mol_type = other DNA
tgttaagtatattaactatt

SEQ ID NO: 278 - DNA, 20 bp, synthetic construct
  source 1..20: mol_type = other DNA
tactcaggaaattagaatat

SEQ ID NO: 279 - DNA, 20 bp, synthetic construct
  source 1..20: mol_type = other DNA
ttatgaaacctcttgatttg

SEQ ID NO: 280 - DNA, 20 bp, synthetic construct
  source 1..20: mol_type = other DNA
ttcttgtaaatgtctgaatt

SEQ ID NO: 281 - DNA, 20 bp, synthetic construct
  source 1..20: mol_type = other DNA
accacaggaaactgtagcaa

SEQ ID NO: 282 - DNA, 20 bp, synthetic construct
  source 1..20: mol_type = other DNA
gattggacccagacactata

SEQ ID NO: 283 - DNA, 20 bp, synthetic construct
  source 1..20: mol_type = other DNA
cctcttaagtcaccatagac

SEQ ID NO: 284 - DNA, 20 bp, synthetic construct
  source 1..20: mol_type = other DNA
ggttgagggacagacacagg

SEQ ID NO: 285 - DNA, 20 bp, synthetic construct
  source 1..20: mol_type = other DNA
ataatcatgatttattttgc

SEQ ID NO: 286 - DNA, 20 bp, synthetic construct
  source 1..20: mol_type = other DNA
cataagaatgtgcacacaaa

SEQ ID NO: 287 - DNA, 20 bp, synthetic construct
  source 1..20: mol_type = other DNA
actcttattagctggtagaa

SEQ ID NO: 288 - DNA, 20 bp, synthetic construct
  source 1..20: mol_type = other DNA
ggaccaaaactgagaggcag

SEQ ID NO: 289 - DNA, 20 bp, synthetic construct
  source 1..20: mol_type = other DNA
ccattactctcaagctccac

SEQ ID NO: 290 - DNA, 20 bp, synthetic construct
  source 1..20: mol_type = other DNA
atctattggttcaggagcca

SEQ ID NO: 291 - DNA, 20 bp, synthetic construct
  source 1..20: mol_type = other DNA
gttaaaacaactagaagcca

SEQ ID NO: 292 - DNA, 20 bp, synthetic construct
  source 1..20: mol_type = other DNA
aggtgttcttgcttatcctc

SEQ ID NO: 293 - DNA, 20 bp, synthetic construct
  source 1..20: mol_type = other DNA
gcagtcactcctcttccagc

SEQ ID NO: 294 - DNA, 20 bp, synthetic construct
  source 1..20: mol_type = other DNA
aagtgtattgcctagatttc

SEQ ID NO: 295 - DNA, 20 bp, synthetic construct
  source 1..20: mol_type = other DNA
gagtgccatcttctctgcac

SEQ ID NO: 296 - DNA, 20 bp, synthetic construct
  source 1..20: mol_type = other DNA
ttattcccagctctaaaata

SEQ ID NO: 297 - DNA, 20 bp, synthetic construct
  source 1..20: mol_type = other DNA
ctcacaattctgtaagggaa

SEQ ID NO: 298 - DNA, 20 bp, synthetic construct
  source 1..20: mol_type = other DNA
ataaaatatattaaggcaac

SEQ ID NO: 299 - DNA, 20 bp, synthetic construct
  source 1..20: mol_type = other DNA
ttgagtcagacatcctgtga

SEQ ID NO: 300 - DNA, 20 bp, synthetic construct
  source 1..20: mol_type = other DNA
taccttttctccatgtcatt

SEQ ID NO: 301 - DNA, 20 bp, synthetic construct
  source 1..20: mol_type = other DNA
gggattttgctgaagctggt

SEQ ID NO: 302 - DNA, 20 bp, synthetic construct
  source 1..20: mol_type = other DNA
ctttgaatagaaaatgacta

SEQ ID NO: 303 - DNA, 20 bp, synthetic construct
  source 1..20: mol_type = other DNA
caaaatcacaagttctagat

SEQ ID NO: 304 - DNA, 20 bp, synthetic construct
  source 1..20: mol_type = other DNA
tttccaatacttttacaaat

SEQ ID NO: 305 - DNA, 20 bp, synthetic construct
  source 1..20: mol_type = other DNA
attaataagcatctctctga

SEQ ID NO: 306 - DNA, 20 bp, synthetic construct
  source 1..20: mol_type = other DNA
tgactatccaatttctagtt

SEQ ID NO: 307 - DNA, 20 bp, synthetic construct
  source 1..20: mol_type = other DNA
cttgtagtctgcacttaatg

SEQ ID NO: 308 - DNA, 20 bp, synthetic construct
  source 1..20: mol_type = other DNA
acattttttaagtacaggaa

SEQ ID NO: 309 - DNA, 20 bp, synthetic construct
  source 1..20: mol_type = other DNA
gaaatgtctagcattttcta

SEQ ID NO: 310 - DNA, 20 bp, synthetic construct
  source 1..20: mol_type = other DNA
ccacttatttgatgaccaca

SEQ ID NO: 311 - DNA, 20 bp, synthetic construct
  source 1..20: mol_type = other DNA
tccagaatactgccccatct

SEQ ID NO: 312 - DNA, 20 bp, synthetic construct
  source 1..20: mol_type = other DNA
tggattcattttctgcaaat

SEQ ID NO: 313 - DNA, 20 bp, synthetic construct
  source 1..20: mol_type = other DNA
agacattgtcaaatgtcccc

SEQ ID NO: 314 - DNA, 20 bp, synthetic construct
  source 1..20: mol_type = other DNA
ttgatgtcagcactgttgac

SEQ ID NO: 315 - DNA, 20 bp, synthetic construct
  source 1..20: mol_type = other DNA
acatcagtagcttcagatgt

SEQ ID NO: 316 - DNA, 20 bp, synthetic construct
  source 1..20: mol_type = other DNA
caaaattaattgtgcataat

SEQ ID NO: 317 - DNA, 20 bp, synthetic construct
  source 1..20: mol_type = other DNA
tttttctttaaattttgcta

SEQ ID NO: 318 - DNA, 20 bp, synthetic construct
  source 1..20: mol_type = other DNA
tagagattttatgtacttgg

SEQ ID NO: 319 - DNA, 20 bp, synthetic construct
  source 1..20: mol_type = other DNA
aaacacaggaatttgcagac

SEQ ID NO: 320 - DNA, 20 bp, synthetic construct
  source 1..20: mol_type = other DNA
gtggaataaaccataatcta

SEQ ID NO: 321 - DNA, 20 bp, synthetic construct
  source 1..20: mol_type = other DNA
gataattcttttcacagaca

SEQ ID NO: 322 - DNA, 20 bp, synthetic construct
  source 1..20: mol_type = other DNA
cttctctatctcccagtgtt

SEQ ID NO: 323 - DNA, 20 bp, synthetic construct
  source 1..20: mol_type = other DNA
caatacaggtaaatttcacg

SEQ ID NO: 324 - DNA, 20 bp, synthetic construct
  source 1..20: mol_type = other DNA
aagggatttaaaatttttat

SEQ ID NO: 325 - DNA, 20 bp, synthetic construct
  source 1..20: mol_type = other DNA
ggcaagctgtacaagaaaaa

SEQ ID NO: 326 - DNA, 20 bp, synthetic construct
  source 1..20: mol_type = other DNA
tgtactcaccggtactctgc

SEQ ID NO: 327 - DNA, 20 bp, synthetic construct
  source 1..20: mol_type = other DNA
aagagaatgctcagaaatgg

SEQ ID NO: 328 - DNA, 20 bp, synthetic construct
  source 1..20: mol_type = other DNA
acacttgtaccccatacatc

SEQ ID NO: 329 - DNA, 20 bp, synthetic construct
  source 1..20: mol_type = other DNA
gacagtagagactgggaagg

SEQ ID NO: 330 - DNA, 20 bp, synthetic construct
  source 1..20: mol_type = other DNA
taccaatttctgaaagggca

SEQ ID NO: 331 - DNA, 20 bp, synthetic construct
  source 1..20: mol_type = other DNA
cagagtaaactccccatctc

SEQ ID NO: 332 - DNA, 20 bp, synthetic construct
  source 1..20: mol_type = other DNA
cttcaaagccagcagtgtaa

SEQ ID NO: 333 - DNA, 20 bp, synthetic construct
  source 1..20: mol_type = other DNA
cttactgggctaaaatcaag

SEQ ID NO: 334 - DNA, 20 bp, synthetic construct
  source 1..20: mol_type = other DNA
tatcactgtactagtttcct

SEQ ID NO: 335 - DNA, 20 bp, synthetic construct
  source 1..20: mol_type = other DNA
ctgtactagtttcctataac

SEQ ID NO: 336 - DNA, 20 bp, synthetic construct
  source 1..20: mol_type = other DNA
actgtactagtttcctataa

SEQ ID NO: 337 - DNA, 20 bp, synthetic construct
  source 1..20: mol_type = other DNA
cactgtactagtttcctata

SEQ ID NO: 338 - DNA, 20 bp, synthetic construct
  source 1..20: mol_type = other DNA
tcactgtactagtttcctat

SEQ ID NO: 339 - DNA, 20 bp, synthetic construct
  source 1..20: mol_type = other DNA
atcactgtactagtttccta

SEQ ID NO: 340 - DNA, 20 bp, synthetic construct
  source 1..20: mol_type = other DNA
gtggaatgtcatggcaattt

SEQ ID NO: 341 - DNA, 20 bp, synthetic construct
  source 1..20: mol_type = other DNA
atgaacggtcttcaagctgt

SEQ ID NO: 342 - DNA, 20 bp, synthetic construct
  source 1..20: mol_type = other DNA
aatgaacggtcttcaagctg

SEQ ID NO: 343 - DNA, 20 bp, synthetic construct
  source 1..20: mol_type = other DNA
aaaatgaacggtcttcaagc

SEQ ID NO: 344 - DNA, 20 bp, synthetic construct
  source 1..20: mol_type = other DNA
ttaaaaatgaacggtcttca

SEQ ID NO: 345 - DNA, 20 bp, synthetic construct
  source 1..20: mol_type = other DNA
cacttaaaaatgaacggtct

SEQ ID NO: 346 - DNA, 20 bp, synthetic construct
  source 1..20: mol_type = other DNA
tgagtctcttgtcacttaaa

SEQ ID NO: 347 - DNA, 20 bp, synthetic construct
  source 1..20: mol_type = other DNA
gaggtgagtctcttgtcact

SEQ ID NO: 348 - DNA, 20 bp, synthetic construct
  source 1..20: mol_type = other DNA
ggaggtgagtctcttgtcac

SEQ ID NO: 349 - DNA, 20 bp, synthetic construct
  source 1..20: mol_type = other DNA
ttggaggtgagtctcttgtc

SEQ ID NO: 350 - DNA, 20 bp, synthetic construct
  source 1..20: mol_type = other DNA
attgcttcttggaggtgagt

SEQ ID NO: 351 - DNA, 20 bp, synthetic construct
  source 1..20: mol_type = other DNA
caattgcttcttggaggtga

SEQ ID NO: 352 - DNA, 20 bp, synthetic construct
  source 1..20: mol_type = other DNA
cacaattgcttcttggaggt

SEQ ID NO: 353 - DNA, 20 bp, synthetic construct
  source 1..20: mol_type = other DNA
acacaattgcttcttggagg

SEQ ID NO: 354 - DNA, 20 bp, synthetic construct
  source 1..20: mol_type = other DNA
aaacacaattgcttcttgga

SEQ ID NO: 355 - DNA, 20 bp, synthetic construct
  source 1..20: mol_type = other DNA
aaaacacaattgcttcttgg

SEQ ID NO: 356 - DNA, 20 bp, synthetic construct
  source 1..20: mol_type = other DNA
gaaaacacaattgcttcttg

SEQ ID NO: 357 - DNA, 20 bp, synthetic construct
  source 1..20: mol_type = other DNA
ttgcttgaataaaatcattc

SEQ ID NO: 358 - DNA, 20 bp, synthetic construct
  source 1..20: mol_type = other DNA
gcttgcttgaataaaatcat

SEQ ID NO: 359 - DNA, 20 bp, synthetic construct
  source 1..20: mol_type = other DNA
ttgcttgcttgaataaaatc

SEQ ID NO: 360 - DNA, 20 bp, synthetic construct
  source 1..20: mol_type = other DNA
agttgcttgcttgaataaaa

SEQ ID NO: 361 - DNA, 20 bp, synthetic construct
  source 1..20: mol_type = other DNA
gaaataagttgcttgcttga

SEQ ID NO: 362 - DNA, 20 bp, synthetic construct
  source 1..20: mol_type = other DNA
aaatgaaataagttgcttgc

SEQ ID NO: 363 - DNA, 20 bp, synthetic construct
  source 1..20: mol_type = other DNA
actgtagcaaacaaggaaat

SEQ ID NO: 364 - DNA, 20 bp, synthetic construct
  source 1..20: mol_type = other DNA
ggaaactgtagcaaacaagg

SEQ ID NO: 365 - DNA, 20 bp, synthetic construct
  source 1..20: mol_type = other DNA
cacaggaaactgtagcaaac

SEQ ID NO: 366 - DNA, 20 bp, synthetic construct
  source 1..20: mol_type = other DNA
agacatccacaggaaactgt

SEQ ID NO: 367 - DNA, 20 bp, synthetic construct
  source 1..20: mol_type = other DNA
gtcagacatccacaggaaac

SEQ ID NO: 368 - DNA, 20 bp, synthetic construct
  source 1..20: mol_type = other DNA
tgagtcagacatccacagga

SEQ ID NO: 369 - DNA, 20 bp, synthetic construct
  source 1..20: mol_type = other DNA
catagagttgagtcagacat

SEQ ID NO: 370 - DNA, 20 bp, synthetic construct
  source 1..20: mol_type = other DNA
tcatagagttgagtcagaca

SEQ ID NO: 371 - DNA, 20 bp, synthetic construct
  source 1..20: mol_type = other DNA
ttcatagagttgagtcagac

SEQ ID NO: 372 - DNA, 20 bp, synthetic construct
  source 1..20: mol_type = other DNA
cgttttcatagagttgagtc

SEQ ID NO: 373 - DNA, 20 bp, synthetic construct
  source 1..20: mol_type = other DNA
ccccacctctgaagaaggcg

SEQ ID NO: 374 - DNA, 20 bp, synthetic construct
  source 1..20: mol_type = other DNA
catccccacctctgaagaag

SEQ ID NO: 375 - DNA, 20 bp, synthetic construct
  source 1..20: mol_type = other DNA
agctacatccccacctctga

SEQ ID NO: 376 - DNA, 20 bp, synthetic construct
  source 1..20: mol_type = other DNA
ggaagctacatccccacctc

SEQ ID NO: 377 - DNA, 20 bp, synthetic construct
  source 1..20: mol_type = other DNA
atggaagctacatccccacc

SEQ ID NO: 378 - DNA, 20 bp, synthetic construct
  source 1..20: mol_type = other DNA
tacatggaagctacatcccc

SEQ ID NO: 379 - DNA, 20 bp, synthetic construct
  source 1..20: mol_type = other DNA
gtacatggaagctacatccc

SEQ ID NO: 380 - DNA, 20 bp, synthetic construct
  source 1..20: mol_type = other DNA
gggtgtacatggaagctaca

SEQ ID NO: 381 - DNA, 20 bp, synthetic construct
  source 1..20: mol_type = other DNA
tggcagtattgggcatttgg

SEQ ID NO: 382 - DNA, 20 bp, synthetic construct
  source 1..20: mol_type = other DNA
catctggcagtattgggcat

SEQ ID NO: 383 - DNA, 20 bp, synthetic construct
  source 1..20: mol_type = other DNA
ctcatctggcagtattgggc

SEQ ID NO: 384 - DNA, 20 bp, synthetic construct
  source 1..20: mol_type = other DNA
cctcatctggcagtattggg

SEQ ID NO: 385 - DNA, 20 bp, synthetic construct
  source 1..20: mol_type = other DNA
acctcatctggcagtattgg

SEQ ID NO: 386 - DNA, 20 bp, synthetic construct
  source 1..20: mol_type = other DNA
tgcacctcatctggcagtat

SEQ ID NO: 387 - DNA, 20 bp, synthetic construct
  source 1..20: mol_type = other DNA
gaatgtgcacctcatctggc

SEQ ID NO: 388 - DNA, 20 bp, synthetic construct
  source 1..20: mol_type = other DNA
tggaatgtgcacctcatctg

SEQ ID NO: 389 - DNA, 20 bp, synthetic construct
  source 1..20: mol_type = other DNA
gggtggaatgtgcacctcat

SEQ ID NO: 390 - DNA, 20 bp, synthetic construct
  source 1..20: mol_type = other DNA
ttgggtggaatgtgcacctc

SEQ ID NO: 391 - DNA, 20 bp, synthetic construct
  source 1..20: mol_type = other DNA
cttgggtggaatgtgcacct

SEQ ID NO: 392 - DNA, 20 bp, synthetic construct
  source 1..20: mol_type = other DNA
tagcaaacaccttgggtgga

SEQ ID NO: 393 - DNA, 20 bp, synthetic construct
  source 1..20: mol_type = other DNA
actgaatagcaaacaccttg

SEQ ID NO: 394 - DNA, 20 bp, synthetic construct
  source 1..20: mol_type = other DNA
aaactgaatagcaaacacct

SEQ ID NO: 395 - DNA, 20 bp, synthetic construct
  source 1..20: mol_type = other DNA
acttgctggaagaaaactga

SEQ ID NO: 396 - DNA, 20 bp, synthetic construct
  source 1..20: mol_type = other DNA
gaacttgctggaagaaaact

SEQ ID NO: 397 - DNA, 20 bp, synthetic construct
  source 1..20: mol_type = other DNA
tgattgaacttgctggaaga

SEQ ID NO: 398 - DNA, 20 bp, synthetic construct
  source 1..20: mol_type = other DNA
cattgattgaacttgctgga

SEQ ID NO: 399 - DNA, 20 bp, synthetic construct
  source 1..20: mol_type = other DNA
tcattgattgaacttgctgg

SEQ ID NO: 400 - DNA, 20 bp, synthetic construct
  source 1..20: mol_type = other DNA
tgtcattgattgaacttgct

SEQ ID NO: 401 - DNA, 20 bp, synthetic construct
  source 1..20: mol_type = other DNA
ccatgtcattgattgaactt

SEQ ID NO: 402 - DNA, 20 bp, synthetic construct
  source 1..20: mol_type = other DNA
ctccatgtcattgattgaac

SEQ ID NO: 403 - DNA, 20 bp, synthetic construct
  source 1..20: mol_type = other DNA
ttctccatgtcattgattga

SEQ ID NO: 404 - DNA, 20 bp, synthetic construct
  source 1..20: mol_type = other DNA
cttttctccatgtcattgat

SEQ ID NO: 405 - DNA, 20 bp, synthetic construct
  source 1..20: mol_type = other DNA
accaaaccttttctccatgt

SEQ ID NO: 406 - DNA, 20 bp, synthetic construct
  source 1..20: mol_type = other DNA
gcaaccaaaccttttctcca

SEQ ID NO: 407 - DNA, 20 bp, synthetic construct
  source 1..20: mol_type = other DNA
agcaaccaaaccttttctcc

SEQ ID NO: 408 - DNA, 20 bp, synthetic construct
  source 1..20: mol_type = other DNA
gaagcaaccaaaccttttct

SEQ ID NO: 409 - DNA, 20 bp, synthetic construct
  source 1..20: mol_type = other DNA
tcaagaagcaaccaaacctt

SEQ ID NO: 410 - DNA, 20 bp, synthetic construct
  source 1..20: mol_type = other DNA
ctttcaagaagcaaccaaac

SEQ ID NO: 411 - DNA, 20 bp, synthetic construct
  source 1..20: mol_type = other DNA
atctttcaagaagcaaccaa

SEQ ID NO: 412 - DNA, 20 bp, synthetic construct
  source 1..20: mol_type = other DNA
ctatctttcaagaagcaacc

SEQ ID NO: 413 - DNA, 20 bp, synthetic construct
  source 1..20: mol_type = other DNA
cactatctttcaagaagcaa

SEQ ID NO: 414 - DNA, 20 bp, synthetic construct
  source 1..20: mol_type = other DNA
aacactatctttcaagaagc

SEQ ID NO: 415 - DNA, 20 bp, synthetic construct
  source 1..20: mol_type = other DNA
atgtacttttggcagggttc

SEQ ID NO: 416 - DNA, 20 bp, synthetic construct
  source 1..20: mol_type = other DNA
cgatgtacttttggcagggt

SEQ ID NO: 417 - DNA, 20 bp, synthetic construct
  source 1..20: mol_type = other DNA
gttcgatgtacttttggcag

SEQ ID NO: 418 - DNA, 20 bp, synthetic construct
  source 1..20: mol_type = other DNA
cctgttcgatgtacttttgg

SEQ ID NO: 419 - DNA, 20 bp, synthetic construct
  source 1..20: mol_type = other DNA
gcacctgttcgatgtacttt

SEQ ID NO: 420 - DNA, 20 bp, synthetic construct
  source 1..20: mol_type = other DNA
ctgcacctgttcgatgtact

SEQ ID NO: 421 - DNA, 20 bp, synthetic construct
  source 1..20: mol_type = other DNA
aactgcacctgttcgatgta

SEQ ID NO: 422 - DNA, 20 bp, synthetic construct
  source 1..20: mol_type = other DNA
gaaactgcacctgttcgatg

SEQ ID NO: 423 - DNA, 20 bp, synthetic construct
  source 1..20: mol_type = other DNA
cagaaactgcacctgttcga

SEQ ID NO: 424 - DNA, 20 bp, synthetic construct
  source 1..20: mol_type = other DNA
ccagaaactgcacctgttcg

SEQ ID NO: 425 - DNA, 20 bp, synthetic construct
  source 1..20: mol_type = other DNA
tgtccagaaactgcacctgt

SEQ ID NO: 426 - DNA, 20 bp, synthetic construct
  source 1..20: mol_type = other DNA
gaatgtccagaaactgcacc

SEQ ID NO: 427 - DNA, 20 bp, synthetic construct
  source 1..20: mol_type = other DNA
aggaatgtccagaaactgca

SEQ ID NO: 428 - DNA, 20 bp, synthetic construct
  source 1..20: mol_type = other DNA
tcaaggaatgtccagaaact

SEQ ID NO: 429 - DNA, 20 bp, synthetic construct
  source 1..20: mol_type = other DNA
cttcaaggaatgtccagaaa

SEQ ID NO: 430 - DNA, 20 bp, synthetic construct
  source 1..20: mol_type = other DNA
ttgcttcaaggaatgtccag

SEQ ID NO: 431 - DNA, 20 bp, synthetic construct
  source 1..20: mol_type = other DNA
cattgcttcaaggaatgtcc

SEQ ID NO: 432 - DNA, 20 bp, synthetic construct
  source 1..20: mol_type = other DNA
gaccacattgcttcaaggaa

SEQ ID NO: 433 - DNA, 20 bp, synthetic construct
  source 1..20: mol_type = other DNA
tgaccacattgcttcaagga

SEQ ID NO: 434 - DNA, 20 bp, synthetic construct
  source 1..20: mol_type = other DNA
atgaccacattgcttcaagg

SEQ ID NO: 435 - DNA, 20 bp, synthetic construct
  source 1..20: mol_type = other DNA
ttgatgaccacattgcttca

SEQ ID NO: 436 - DNA, 20 bp, synthetic construct
  source 1..20: mol_type = other DNA
atttgatgaccacattgctt

SEQ ID NO: 437 - DNA, 20 bp, synthetic construct
  source 1..20: mol_type = other DNA
ttatttgatgaccacattgc

SEQ ID NO: 438 - DNA, 20 bp, synthetic construct
  source 1..20: mol_type = other DNA
cttatttgatgaccacattg

SEQ ID NO: 439 - DNA, 20 bp, synthetic construct
  source 1..20: mol_type = other DNA
cacttatttgatgaccacat

SEQ ID NO: 440 - DNA, 20 bp, synthetic construct
  source 1..20: mol_type = other DNA
agcacttatttgatgaccac

SEQ ID NO: 441 - DNA, 20 bp, synthetic construct
  source 1..20: mol_type = other DNA
caagcacttatttgatgacc

SEQ ID NO: 442 - DNA, 20 bp, synthetic construct
  source 1..20: mol_type = other DNA
cgatggcaagcacttatttg

SEQ ID NO: 443 - DNA, 20 bp, synthetic construct
  source 1..20: mol_type = other DNA
tgtctcgatggcaagcactt

SEQ ID NO: 444 - DNA, 20 bp, synthetic construct
  source 1..20: mol_type = other DNA
atgtctcgatggcaagcact

SEQ ID NO: 445 - DNA, 20 bp, synthetic construct
  source 1..20: mol_type = other DNA
aatgtctcgatggcaagcac

SEQ ID NO: 446 - DNA, 20 bp, synthetic construct
  source 1..20: mol_type = other DNA
ttataaatgtctcgatggca

SEQ ID NO: 447 - DNA, 20 bp, synthetic construct
  source 1..20: mol_type = other DNA
tttataaatgtctcgatggc

SEQ ID NO: 448 - DNA, 20 bp, synthetic construct
  source 1..20: mol_type = other DNA
ctcctttataaatgtctcga

SEQ ID NO: 449 - DNA, 20 bp, synthetic construct
  source 1..20: mol_type = other DNA
aactcctttataaatgtctc

SEQ ID NO: 450 - DNA, 20 bp, synthetic construct
  source 1..20: mol_type = other DNA
tcaactcctttataaatgtc

SEQ ID NO: 451 - DNA, 20 bp, synthetic construct
  source 1..20: mol_type = other DNA
tatcaactcctttataaatg

SEQ ID NO: 452 - DNA, 20 bp, synthetic construct
  source 1..20: mol_type = other DNA
ctctcatatcaactccttta

SEQ ID NO: 453 - DNA, 20 bp, synthetic construct
  source 1..20: mol_type = other DNA
ctcctctcatatcaactcct

SEQ ID NO: 454 - DNA, 20 bp, synthetic construct
  source 1..20: mol_type = other DNA
gactcctctcatatcaactc

SEQ ID NO: 455 - DNA, 20 bp, synthetic construct
  source 1..20: mol_type = other DNA
aattgactcctctcatatca

SEQ ID NO: 456 - DNA, 20 bp, synthetic construct
  source 1..20: mol_type = other DNA
attaaaattgactcctctca

SEQ ID NO: 457 - DNA, 20 bp, synthetic construct
  source 1..20: mol_type = other DNA
cattaaaattgactcctctc

SEQ ID NO: 458 - DNA, 20 bp, synthetic construct
  source 1..20: mol_type = other DNA
cacattaaaattgactcctc

SEQ ID NO: 459 - DNA, 20 bp, synthetic construct
  source 1..20: mol_type = other DNA
gacacattaaaattgactcc

SEQ ID NO: 460 - DNA, 20 bp, synthetic construct
  source 1..20: mol_type = other DNA
agacacattaaaattgactc

SEQ ID NO: 461 - DNA, 20 bp, synthetic construct
  source 1..20: mol_type = other DNA
accttagacacattaaaatt

SEQ ID NO: 462 - DNA, 20 bp, synthetic construct
  source 1..20: mol_type = other DNA
gctaaccttagacacattaa

SEQ ID NO: 463 - DNA, 20 bp, synthetic construct
  source 1..20: mol_type = other DNA
actgctaaccttagacacat

SEQ ID NO: 464 - DNA, 20 bp, synthetic construct
  source 1..20: mol_type = other DNA
cactgctaaccttagacaca

SEQ ID NO: 465 - DNA, 20 bp, synthetic construct
  source 1..20: mol_type = other DNA
acactgctaaccttagacac

SEQ ID NO: 466 - DNA, 20 bp, synthetic construct
  source 1..20: mol_type = other DNA
cttcaacactgctaacctta

SEQ ID NO: 467 - DNA, 20 bp, synthetic construct
  source 1..20: mol_type = other DNA
tcttcaacactgctaacctt

SEQ ID NO: 468 - DNA, 20 bp, synthetic construct
  source 1..20: mol_type = other DNA
ggcattcttcaacactgcta

SEQ ID NO: 469 - DNA, 20 bp, synthetic construct
  source 1..20: mol_type = other DNA
tggcattcttcaacactgct

SEQ ID NO: 470 - DNA, 20 bp, synthetic construct
  source 1..20: mol_type = other DNA
tttggcattcttcaacactg

SEQ ID NO: 471 - DNA, 20 bp, synthetic construct
  source 1..20: mol_type = other DNA
aaaactggcagcgaatgtta

SEQ ID NO: 472 - DNA, 20 bp, synthetic construct
  source 1..20: mol_type = other DNA
ccggtactctgccttgtgaa

SEQ ID NO: 473 - DNA, 20 bp, synthetic construct
  source 1..20: mol_type = other DNA
attgttccggtactctgcct

SEQ ID NO: 474 - DNA, 20 bp, synthetic construct
  source 1..20: mol_type = other DNA
aattgttccggtactctgcc

SEQ ID NO: 475 - DNA, 20 bp, synthetic construct
  source 1..20: mol_type = other DNA
caattgttccggtactctgc

SEQ ID NO: 476 - DNA, 20 bp, synthetic construct
  source 1..20: mol_type = other DNA
aataggcaattgttccggta

SEQ ID NO: 477 - DNA, 20 bp, synthetic construct
  source 1..20: mol_type = other DNA
taataggcaattgttccggt

SEQ ID NO: 478 - DNA, 20 bp, synthetic construct
  source 1..20: mol_type = other DNA
ctttaataggcaattgttcc

SEQ ID NO: 479 - DNA, 20 bp, synthetic construct
  source 1..20: mol_type = other DNA
gtactttaataggcaattgt

SEQ ID NO: 480 - DNA, 20 bp, synthetic construct
  source 1..20: mol_type = other DNA
cgggactgtactttaatagg

SEQ ID NO: 481 - DNA, 20 bp, synthetic construct
  source 1..20: mol_type = other DNA
cgttactcagcacctttata

SEQ ID NO: 482 - DNA, 20 bp, synthetic construct
  source 1..20: mol_type = other DNA
gcttcagtgagaatccagat

SEQ ID NO: 483 - DNA, 20 bp, synthetic construct
  source 1..20: mol_type = other DNA
ccaatttctgaaagggcaca

SEQ ID NO: 484 - DNA, 20 bp, synthetic construct
  source 1..20: mol_type = other DNA
aaccaatttctgaaagggca

SEQ ID NO: 485 - DNA, 20 bp, synthetic construct
  source 1..20: mol_type = other DNA
gcaaccaatttctgaaaggg

SEQ ID NO: 486 - DNA, 20 bp, synthetic construct
  source 1..20: mol_type = other DNA
ggcaaccaatttctgaaagg

SEQ ID NO: 487 - DNA, 20 bp, synthetic construct
  source 1..20: mol_type = other DNA
agatgctggaagatgttcat

SEQ ID NO: 488 - DNA, 20 bp, synthetic construct
  source 1..20: mol_type = other DNA
caacatccacatctgagaac

SEQ ID NO: 489 - DNA, 20 bp, synthetic construct
  source 1..20: mol_type = other DNA
ggcaacatccacatctgaga

SEQ ID NO: 490 - DNA, 20 bp, synthetic construct
  source 1..20: mol_type = other DNA
ccctggcaacatccacatct

SEQ ID NO: 491 - DNA, 20 bp, synthetic construct
  source 1..20: mol_type = other DNA
gaaccctggcaacatccaca

SEQ ID NO: 492 - DNA, 20 bp, synthetic construct
  source 1..20: mol_type = other DNA
gagaaccctggcaacatcca

SEQ ID NO: 493 - DNA, 20 bp, synthetic construct
  source 1..20: mol_type = other DNA
tgagaaccctggcaacatcc

SEQ ID NO: 494 - DNA, 20 bp, synthetic construct
  source 1..20: mol_type = other DNA
ggagtgagaaccctggcaac

SEQ ID NO: 495 - DNA, 20 bp, synthetic construct
  source 1..20: mol_type = other DNA
ctggagtgagaaccctggca

SEQ ID NO: 496 - DNA, 20 bp, synthetic construct
  source 1..20: mol_type = other DNA
atctggagtgagaaccctgg

SEQ ID NO: 497 - DNA, 20 bp, synthetic construct
  source 1..20: mol_type = other DNA
gcatctggagtgagaaccct

SEQ ID NO: 498 - DNA, 20 bp, synthetic construct
  source 1..20: mol_type = other DNA
aagcatctggagtgagaacc

SEQ ID NO: 499 - DNA, 20 bp, synthetic construct
  source 1..20: mol_type = other DNA
caaaagcatctggagtgaga

SEQ ID NO: 500 - DNA, 20 bp, synthetic construct
  source 1..20: mol_type = other DNA
cacaaaagcatctggagtga

SEQ ID NO: 501 - DNA, 20 bp, synthetic construct
  source 1..20: mol_type = other DNA
tggtccgacacacaaaagca

SEQ ID NO: 502 - DNA, 20 bp, synthetic construct
  source 1..20: mol_type = other DNA
atggtccgacacacaaaagc

SEQ ID NO: 503 - DNA, 20 bp, synthetic construct
  source 1..20: mol_type = other DNA
gatggtccgacacacaaaag

SEQ ID NO: 504 - DNA, 20 bp, synthetic construct
  source 1..20: mol_type = other DNA
gcagatggtccgacacacaa

SEQ ID NO: 505 - DNA, 20 bp, synthetic construct
  source 1..20: mol_type = other DNA
taggtgcagatggtccgaca

SEQ ID NO: 506 - DNA, 20 bp, synthetic construct
  source 1..20: mol_type = other DNA
gataggtgcagatggtccga

SEQ ID NO: 507 - DNA, 20 bp, synthetic construct
  source 1..20: mol_type = other DNA
gtgataggtgcagatggtcc

SEQ ID NO: 508 - DNA, 20 bp, synthetic construct
  source 1..20: mol_type = other DNA
gggtgataggtgcagatggt

SEQ ID NO: 509 - DNA, 20 bp, synthetic construct
  source 1..20: mol_type = other DNA
gaatgtaaagaagaggcagt

SEQ ID NO: 510 - DNA, 20 bp, synthetic construct
  source 1..20: mol_type = other DNA
tagaatgtaaagaagaggca

SEQ ID NO: 511 - DNA, 20 bp, synthetic construct
  source 1..20: mol_type = other DNA
catttgtatagaatgtaaag

SEQ ID NO: 512 - DNA, 20 bp, synthetic construct
  source 1..20: mol_type = other DNA
tacatttgtatagaatgtaa

SEQ ID NO: 513 - DNA, 20 bp, synthetic construct
  source 1..20: mol_type = other DNA
ccatacatttgtatagaatg

SEQ ID NO: 514 - DNA, 20 bp, synthetic construct
  source 1..20: mol_type = other DNA
ctcgattttccatacatttg

SEQ ID NO: 515 - DNA, 20 bp, synthetic construct
  source 1..20: mol_type = other DNA
tgactcgattttccatacat

SEQ ID NO: 516 - DNA, 20 bp, synthetic construct
  source 1..20: mol_type = other DNA
gtgactcgattttccataca

SEQ ID NO: 517 - DNA, 20 bp, synthetic construct
  source 1..20: mol_type = other DNA
tgtgactcgattttccatac

SEQ ID NO: 518 - DNA, 20 bp, synthetic construct
  source 1..20: mol_type = other DNA
ctttgtgactcgattttcca

SEQ ID NO: 519 - DNA, 20 bp, synthetic construct
  source 1..20: mol_type = other DNA
ttctttgtgactcgattttc

SEQ ID NO: 520 - DNA, 20 bp, synthetic construct
  source 1..20: mol_type = other DNA
acatttctttgtgactcgat

SEQ ID NO: 521 - DNA, 20 bp, synthetic construct
  source 1..20: mol_type = other DNA
aaacatttctttgtgactcg

SEQ ID NO: 522 - DNA, 20 bp, synthetic construct
  source 1..20: mol_type = other DNA
tgtgccactttcagatgttt

SEQ ID NO: 523 - DNA, 20 bp, synthetic construct
  source 1..20: mol_type = other DNA
gtgtgccactttcagatgtt

SEQ ID NO: 524 - DNA, 20 bp, synthetic construct
  source 1..20: mol_type = other DNA
cttggtgtgccactttcaga

SEQ ID NO: 525 - DNA, 20 bp, synthetic construct
  source 1..20: mol_type = other DNA
acttggtgtgccactttcag

SEQ ID NO: 526 - DNA, 20 bp, synthetic construct
  source 1..20: mol_type = other DNA
aggaacttggtgtgccactt

SEQ ID NO: 527 - DNA, 20 bp, synthetic construct
  source 1..20: mol_type = other DNA
tggtgttttcttgaggagta

SEQ ID NO: 528 - DNA, 20 bp, synthetic construct
  source 1..20: mol_type = other DNA
atggtgttttcttgaggagt

SEQ ID NO: 529 - DNA, 20 bp, synthetic construct
  source 1..20: mol_type = other DNA
tatggtgttttcttgaggag

SEQ ID NO: 530 - DNA, 20 bp, synthetic construct
  source 1..20: mol_type = other DNA
cagatatggtgttttcttga

SEQ ID NO: 531 - DNA, 20 bp, synthetic construct
  source 1..20: mol_type = other DNA
ccagatatggtgttttcttg

SEQ ID NO: 532 - DNA, 20 bp, synthetic construct
  source 1..20: mol_type = other DNA
atccagatatggtgttttct

SEQ ID NO: 533 - DNA, 20 bp, synthetic construct
  source 1..20: mol_type = other DNA
atatccagatatggtgtttt

SEQ ID NO: 534 - DNA, 20 bp, synthetic construct
  source 1..20: mol_type = other DNA
ggctatatccagatatggtg

SEQ ID NO: 535 - DNA, 20 bp, synthetic construct
  source 1..20: mol_type = other DNA
aaggctatatccagatatgg

SEQ ID NO: 536 - DNA, 20 bp, synthetic construct
  source 1..20: mol_type = other DNA
gttaaaaggctatatccaga

SEQ ID NO: 537 - DNA, 20 bp, synthetic construct
  source 1..20: mol_type = other DNA
caggttaaaaggctatatcc

SEQ ID NO: 538 - DNA, 20 bp, synthetic construct
  source 1..20: mol_type = other DNA
tgcaggttaaaaggctatat

SEQ ID NO: 539 - DNA, 20 bp, synthetic construct
  source 1..20: mol_type = other DNA
tttgcaggttaaaaggctat

SEQ ID NO: 540 - DNA, 20 bp, synthetic construct
  source 1..20: mol_type = other DNA
cttttgcaggttaaaaggct

SEQ ID NO: 541 - DNA, 20 bp, synthetic construct
  source 1..20: mol_type = other DNA
gttcttttgcaggttaaaag

SEQ ID NO: 542 - DNA, 20 bp, synthetic construct
  source 1..20: mol_type = other DNA
aagttcttttgcaggttaaa

SEQ ID NO: 543 - DNA, 20 bp, synthetic construct
  source 1..20: mol_type = other DNA
gtaaagttcttttgcaggtt

SEQ ID NO: 544 - DNA, 20 bp, synthetic construct
  source 1..20: mol_type = other DNA
caggtaaagttcttttgcag

SEQ ID NO: 545 - DNA, 20 bp, synthetic construct
  source 1..20: mol_type = other DNA
tcaggtaaagttcttttgca

SEQ ID NO: 546 - DNA, 20 bp, synthetic construct
  source 1..20: mol_type = other DNA
gttcaggtaaagttcttttg

SEQ ID NO: 547 - DNA, 20 bp, synthetic construct
  source 1..20: mol_type = other DNA
gggttcaggtaaagttcttt

SEQ ID NO: 548 - DNA, 20 bp, synthetic construct
  source 1..20: mol_type = other DNA
cagggttcaggtaaagttct

SEQ ID NO: 549 - DNA, 20 bp, synthetic construct
  source 1..20: mol_type = other DNA
gcagggttcaggtaaagttc

SEQ ID NO: 550 - DNA, 20 bp, synthetic construct
  source 1..20: mol_type = other DNA
tggcagggttcaggtaaagt

SEQ ID NO: 551 - DNA, 20 bp, synthetic construct
  source 1..20: mol_type = other DNA
gaatggcagggttcaggtaa

SEQ ID NO: 552 - DNA, 20 bp, synthetic construct
  source 1..20: mol_type = other DNA
agaatggcagggttcaggta

SEQ ID NO: 553 - DNA, 20 bp, synthetic construct
  source 1..20: mol_type = other DNA
tttagaatggcagggttcag

SEQ ID NO: 554 - DNA, 20 bp, synthetic construct
  source 1..20: mol_type = other DNA
attttagaatggcagggttc

SEQ ID NO: 555 - DNA, 20 bp, synthetic construct
  source 1..20: mol_type = other DNA
taaattttagaatggcaggg

SEQ ID NO: 556 - DNA, 20 bp, synthetic construct
  source 1..20: mol_type = other DNA
agtcaactcccgggtaaatt

SEQ ID NO: 557 - DNA, 20 bp, synthetic construct
  source 1..20: mol_type = other DNA
caaagtcaactcccgggtaa

SEQ ID NO: 558 - DNA, 20 bp, synthetic construct
  source 1..20: mol_type = other DNA
ccaaagtcaactcccgggta

SEQ ID NO: 559 - DNA, 20 bp, synthetic construct
  source 1..20: mol_type = other DNA
cctccaaagtcaactcccgg

SEQ ID NO: 560 - DNA, 20 bp, synthetic construct
  source 1..20: mol_type = other DNA
ctcctccaaagtcaactccc

SEQ ID NO: 561 - DNA, 20 bp, synthetic construct
  source 1..20: mol_type = other DNA
cttctcctccaaagtcaact

SEQ ID NO: 562 - DNA, 20 bp, synthetic construct
  source 1..20: mol_type = other DNA
ttcaattcttctcctccaaa

SEQ ID NO: 563 - DNA, 20 bp, synthetic construct
  source 1..20: mol_type = other DNA
cattcaattcttctcctcca

SEQ ID NO: 564 - DNA, 20 bp, synthetic construct
  source 1..20: mol_type = other DNA
tcacattcaattcttctcct

SEQ ID NO: 565 - DNA, 20 bp, synthetic construct
  source 1..20: mol_type = other DNA
agtcacattcaattcttctc

SEQ ID NO: 566 - DNA, 20 bp, synthetic construct
  source 1..20: mol_type = other DNA
ggcaaacattcactccttta

SEQ ID NO: 567 - DNA, 20 bp, synthetic construct
  source 1..20: mol_type = other DNA
tcttggcaaacattcactcc

SEQ ID NO: 568 - DNA, 20 bp, synthetic construct
  source 1..20: mol_type = other DNA
gtctcttggcaaacattcac

SEQ ID NO: 569 - DNA, 20 bp, synthetic construct
  source 1..20: mol_type = other DNA
caagtctcttggcaaacatt

SEQ ID NO: 570 - DNA, 20 bp, synthetic construct
  source 1..20: mol_type = other DNA
tgcaagtctcttggcaaaca

SEQ ID NO: 571 - DNA, 20 bp, synthetic construct
  source 1..20: mol_type = other DNA
ctttgtgcaagtctcttggc

SEQ ID NO: 572 - DNA, 20 bp, synthetic construct
  source 1..20: mol_type = other DNA
catctttgtgcaagtctctt

SEQ ID NO: 573 - DNA, 20 bp, synthetic construct
  source 1..20: mol_type = other DNA
tcatctttgtgcaagtctct

SEQ ID NO: 574 - DNA, 20 bp, synthetic construct
  source 1..20: mol_type = other DNA
atcatctttgtgcaagtctc

SEQ ID NO: 575 - DNA, 20 bp, synthetic construct
  source 1..20: mol_type = other DNA
acagcgaatcatctttgtgc

SEQ ID NO: 576 - DNA, 20 bp, synthetic construct
  source 1..20: mol_type = other DNA
actgacagcgaatcatcttt

SEQ ID NO: 577 - DNA, 20 bp, synthetic construct
  source 1..20: mol_type = other DNA
gaaaaactgacagcgaatca

SEQ ID NO: 578 - DNA, 20 bp, synthetic construct
  source 1..20: mol_type = other DNA
gtgaaaaactgacagcgaat

SEQ ID NO: 579 - DNA, 20 bp, synthetic construct
  source 1..20: mol_type = other DNA
ggagtaaagaataagtgaaa

SEQ ID NO: 580 - DNA, 20 bp, synthetic construct
  source 1..20: mol_type = other DNA
tgggagtaaagaataagtga

SEQ ID NO: 581 - DNA, 20 bp, synthetic construct
  source 1..20: mol_type = other DNA
tctgggagtaaagaataagt

SEQ ID NO: 582 - DNA, 20 bp, synthetic construct
  source 1..20: mol_type = other DNA
gtcttctgggagtaaagaat

SEQ ID NO: 583 - DNA, 20 bp, synthetic construct
  source 1..20: mol_type = other DNA
acagtcttctgggagtaaag

SEQ ID NO: 584 - DNA, 20 bp, synthetic construct
  source 1..20: mol_type = other DNA
cttacagtcttctgggagta

SEQ ID NO: 585 - DNA, 20 bp, synthetic construct
  source 1..20: mol_type = other DNA
ccttacagtcttctgggagt

SEQ ID NO: 586 - DNA, 20 bp, synthetic construct
  source 1..20: mol_type = other DNA
tccttacagtcttctgggag

SEQ ID NO: 587 - DNA, 20 bp, synthetic construct
  source 1..20: mol_type = other DNA
cttccttacagtcttctggg

SEQ ID NO: 588 - DNA, 20 bp, synthetic construct
  source 1..20: mol_type = other DNA
cacttacacttctcttcctt

SEQ ID NO: 589 - DNA, 20 bp, synthetic construct
  source 1..20: mol_type = other DNA
acacttacacttctcttcct

SEQ ID NO: 590 - DNA, 20 bp, synthetic construct
  source 1..20: mol_type = other DNA
agaaacacttacacttctct

SEQ ID NO: 591 - DNA, 20 bp, synthetic construct
  source 1..20: mol_type = other DNA
cttaagaaacacttacactt

SEQ ID NO: 592 - DNA, 20 bp, synthetic construct
  source 1..20: mol_type = other DNA
ccatagataatcttaagaaa

SEQ ID NO: 593 - DNA, 20 bp, synthetic construct
  source 1..20: mol_type = other DNA
catccatagataatcttaag

SEQ ID NO: 594 - DNA, 20 bp, synthetic construct
  source 1..20: mol_type = other DNA
accatccatagataatctta

SEQ ID NO: 595 - DNA, 20 bp, synthetic construct
  source 1..20: mol_type = other DNA
gaaccatccatagataatct

SEQ ID NO: 596 - DNA, 20 bp, synthetic construct
  source 1..20: mol_type = other DNA
tggagaaccatccatagata

SEQ ID NO: 597 - DNA, 20 bp, synthetic construct
  source 1..20: mol_type = other DNA
tgtgtcccatacgcaatcct

SEQ ID NO: 598 - DNA, 20 bp, synthetic construct
  source 1..20: mol_type = other DNA
cccttgtgtcccatacgcaa

SEQ ID NO: 599 - DNA, 20 bp, synthetic construct
  source 1..20: mol_type = other DNA
gctcccttgtgtcccatacg

SEQ ID NO: 600 - DNA, 20 bp, synthetic construct
  source 1..20: mol_type = other DNA
agagctcccttgtgtcccat

SEQ ID NO: 601 - DNA, 20 bp, synthetic construct
  source 1..20: mol_type = other DNA
ccagagctcccttgtgtccc

SEQ ID NO: 602 - DNA, 20 bp, synthetic construct
  source 1..20: mol_type = other DNA
taaccagagctcccttgtgt

SEQ ID NO: 603 - DNA, 20 bp, synthetic construct
  source 1..20: mol_type = other DNA
gtaaccagagctcccttgtg

SEQ ID NO: 604 - DNA, 20 bp, synthetic construct
  source 1..20: mol_type = other DNA
gagtaaccagagctcccttg

SEQ ID NO: 605 - DNA, 20 bp, synthetic construct
  source 1..20: mol_type = other DNA
aagagtaaccagagctccct

SEQ ID NO: 606 - DNA, 20 bp, synthetic construct
  source 1..20: mol_type = other DNA
tcaaagagtaaccagagctc

SEQ ID NO: 607 - DNA, 20 bp, synthetic construct
  source 1..20: mol_type = other DNA
tctcaaagagtaaccagagc

SEQ ID NO: 608 - DNA, 20 bp, synthetic construct
  source 1..20: mol_type = other DNA
aatctcaaagagtaaccaga

SEQ ID NO: 609 - DNA, 20 bp, synthetic construct
  source 1..20: mol_type = other DNA
caatctcaaagagtaaccag

SEQ ID NO: 610 - DNA, 20 bp, synthetic construct
  source 1..20: mol_type = other DNA
cacaatctcaaagagtaacc

SEQ ID NO: 611 - DNA, 20 bp, synthetic construct
  source 1..20: mol_type = other DNA
gttacacaatctcaaagagt

SEQ ID NO: 612 - DNA, 20 bp, synthetic construct
  source 1..20: mol_type = other DNA
cagtgttacacaatctcaaa

SEQ ID NO: 613 - DNA, 20 bp, synthetic construct
  source 1..20: mol_type = other DNA
cccagtgttacacaatctca

SEQ ID NO: 614 - DNA, 20 bp, synthetic construct
  source 1..20: mol_type = other DNA
gtccccagtgttacacaatc

SEQ ID NO: 615 - DNA, 20 bp, synthetic construct
  source 1..20: mol_type = other DNA
gttgtccccagtgttacaca

SEQ ID NO: 616 - DNA, 20 bp, synthetic construct
  source 1..20: mol_type = other DNA
gtttgttcctccaacaatgc

SEQ ID NO: 617 - DNA, 20 bp, synthetic construct
  source 1..20: mol_type = other DNA
agagtttgttcctccaacaa

SEQ ID NO: 618 - DNA, 20 bp, synthetic construct
  source 1..20: mol_type = other DNA
caagaagagtttgttcctcc

SEQ ID NO: 619 - DNA, 20 bp, synthetic construct
  source 1..20: mol_type = other DNA
ccccaagaagagtttgttcc

SEQ ID NO: 620 - DNA, 20 bp, synthetic construct
  source 1..20: mol_type = other DNA
ctccccaagaagagtttgtt

SEQ ID NO: 621 - DNA, 20 bp, synthetic construct
  source 1..20: mol_type = other DNA
ctctccccaagaagagtttg

SEQ ID NO: 622 - DNA, 20 bp, synthetic construct
  source 1..20: mol_type = other DNA
gggccactctccccaagaag

SEQ ID NO: 623 - DNA, 20 bp, synthetic construct
  source 1..20: mol_type = other DNA
cagggccactctccccaaga

SEQ ID NO: 624 - DNA, 20 bp, synthetic construct
  source 1..20: mol_type = other DNA
tctgagctgtcagcttcacc

SEQ ID NO: 625 - DNA, 20 bp, synthetic construct
  source 1..20: mol_type = other DNA
gcctctgagctgtcagcttc

SEQ ID NO: 626 - DNA, 20 bp, synthetic construct
  source 1..20: mol_type = other DNA
tcctatgagtgaccctccac

SEQ ID NO: 627 - DNA, 20 bp, synthetic construct
  source 1..20: mol_type = other DNA
gtcctatgagtgaccctcca

SEQ ID NO: 628 - DNA, 20 bp, synthetic construct
  source 1..20: mol_type = other DNA
ggtgtcctatgagtgaccct

SEQ ID NO: 629 - DNA, 20 bp, synthetic construct
  source 1..20: mol_type = other DNA
tggtgtcctatgagtgaccc

SEQ ID NO: 630 - DNA, 20 bp, synthetic construct
  source 1..20: mol_type = other DNA
ccactggtgtcctatgagtg

SEQ ID NO: 631 - DNA, 20 bp, synthetic construct
  source 1..20: mol_type = other DNA
cccactggtgtcctatgagt

SEQ ID NO: 632 - DNA, 20 bp, synthetic construct
  source 1..20: mol_type = other DNA
gaagcccatcaaagcagtgg

SEQ ID NO: 633 - DNA, 20 bp, synthetic construct
  source 1..20: mol_type = other DNA
tatagatgcgccaaacatcc

SEQ ID NO: 634 - DNA, 20 bp, synthetic construct
  source 1..20: mol_type = other DNA
ctatagatgcgccaaacatc

SEQ ID NO: 635 - DNA, 20 bp, synthetic construct
  source 1..20: mol_type = other DNA
gccactatagatgcgccaaa

SEQ ID NO: 636 - DNA, 20 bp, synthetic construct
  source 1..20: mol_type = other DNA
atgccactatagatgcgcca

SEQ ID NO: 637 - DNA, 20 bp, synthetic construct
  source 1..20: mol_type = other DNA
taatgtctgacagatttaaa

SEQ ID NO: 638 - DNA, 20 bp, synthetic construct
  source 1..20: mol_type = other DNA
ttgtaatgtctgacagattt

SEQ ID NO: 639 - DNA, 20 bp, synthetic construct
  source 1..20: mol_type = other DNA
tgagaaaggtgtatcttttg

SEQ ID NO: 640 - DNA, 20 bp, synthetic construct
  source 1..20: mol_type = other DNA
ttgtgagaaaggtgtatctt

SEQ ID NO: 641 - DNA, 20 bp, synthetic construct
  source 1..20: mol_type = other DNA
tttgtgagaaaggtgtatct

SEQ ID NO: 642 - DNA, 20 bp, synthetic construct
  source 1..20: mol_type = other DNA
atttgtgagaaaggtgtatc

SEQ ID NO: 643 - DNA, 20 bp, synthetic construct
  source 1..20: mol_type = other DNA
ttatttgtgagaaaggtgta

SEQ ID NO: 644 - DNA, 20 bp, synthetic construct
  source 1..20: mol_type = other DNA
ttttatttgtgagaaaggtg

SEQ ID NO: 645 - DNA, 20 bp, synthetic construct
  source 1..20: mol_type = other DNA
cttttatttgtgagaaaggt

SEQ ID NO: 646 - DNA, 20 bp, synthetic construct
  source 1..20: mol_type = other DNA
ctcttttatttgtgagaaag

SEQ ID NO: 647 - DNA, 20 bp, synthetic construct
  source 1..20: mol_type = other DNA
ttggtgaataataatctctt

SEQ ID NO: 648 - DNA, 20 bp, synthetic construct
  source 1..20: mol_type = other DNA
tttggtgaataataatctct

SEQ ID NO: 649 - DNA, 20 bp, synthetic construct
  source 1..20: mol_type = other DNA
gttttggtgaataataatct

SEQ ID NO: 650 - DNA, 20 bp, synthetic construct
  source 1..20: mol_type = other DNA
tatagttttggtgaataata

SEQ ID NO: 651 - DNA, 20 bp, synthetic construct
  source 1..20: mol_type = other DNA
actttatagttttggtgaat

SEQ ID NO: 652 - DNA, 20 bp, synthetic construct
  source 1..20: mol_type = other DNA
cccttctgagactttatagt

SEQ ID NO: 653 - DNA, 20 bp, synthetic construct
  source 1..20: mol_type = other DNA
gattcccttctgagacttta

SEQ ID NO: 654 - DNA, 20 bp, synthetic construct
  source 1..20: mol_type = other DNA
catgattcccttctgagact

SEQ ID NO: 655 - DNA, 20 bp, synthetic construct
  source 1..20: mol_type = other DNA
tcatgattcccttctgagac

SEQ ID NO: 656 - DNA, 20 bp, synthetic construct
  source 1..20: mol_type = other DNA
tatcatgattcccttctgag

SEQ ID NO: 657 - DNA, 20 bp, synthetic construct
  source 1..20: mol_type = other DNA
atatcatgattcccttctga

SEQ ID NO: 658 - DNA, 20 bp, synthetic construct
  source 1..20: mol_type = other DNA
gcgatatcatgattcccttc

SEQ ID NO: 659 - DNA, 20 bp, synthetic construct
  source 1..20: mol_type = other DNA
ggcgatatcatgattccctt

SEQ ID NO: 660 - DNA, 20 bp, synthetic construct
  source 1..20: mol_type = other DNA
aaggcgatatcatgattccc

SEQ ID NO: 661 - DNA, 20 bp, synthetic construct
  source 1..20: mol_type = other DNA
tatcaaggcgatatcatgat

SEQ ID NO: 662 - DNA, 20 bp, synthetic construct
  source 1..20: mol_type = other DNA
gagttttatcaaggcgatat

SEQ ID NO: 663 - DNA, 20 bp, synthetic construct
  source 1..20: mol_type = other DNA
ctggagttttatcaaggcga

SEQ ID NO: 664 - DNA, 20 bp, synthetic construct
  source 1..20: mol_type = other DNA
gcctggagttttatcaaggc

SEQ ID NO: 665 - DNA, 20 bp, synthetic construct
  source 1..20: mol_type = other DNA
aggagcctggagttttatca

SEQ ID NO: 666 - DNA, 20 bp, synthetic construct
  source 1..20: mol_type = other DNA
attcaaaggagcctggagtt

SEQ ID NO: 667 - DNA, 20 bp, synthetic construct
  source 1..20: mol_type = other DNA
gtaattcaaaggagcctgga

SEQ ID NO: 668 - DNA, 20 bp, synthetic construct
  source 1..20: mol_type = other DNA
gtgtaattcaaaggagcctg

SEQ ID NO: 669 - DNA, 20 bp, synthetic construct
  source 1..20: mol_type = other DNA
cagtgtaattcaaaggagcc

SEQ ID NO: 670 - DNA, 20 bp, synthetic construct
  source 1..20: mol_type = other DNA
taggcatattggtttttgga

SEQ ID NO: 671 - DNA, 20 bp, synthetic construct
  source 1..20: mol_type = other DNA
ggtaggcatattggtttttg

SEQ ID NO: 672 - DNA, 20 bp, synthetic construct
  source 1..20: mol_type = other DNA
gaaggtaggcatattggttt

SEQ ID NO: 673 - DNA, 20 bp, synthetic construct
  source 1..20: mol_type = other DNA
cttgtgtcacctttggaagg

SEQ ID NO: 674 - DNA, 20 bp, synthetic construct
  source 1..20: mol_type = other DNA
gcttgtgtcacctttggaag

SEQ ID NO: 675 - DNA, 20 bp, synthetic construct
  source 1..20: mol_type = other DNA
gtgcttgtgtcacctttgga

SEQ ID NO: 676 - DNA, 20 bp, synthetic construct
  source 1..20: mol_type = other DNA
aaattgtgcttgtgtcacct

SEQ ID NO: 677 - DNA, 20 bp, synthetic construct
  source 1..20: mol_type = other DNA
gtataaattgtgcttgtgtc

SEQ ID NO: 678 - DNA, 20 bp, synthetic construct
  source 1..20: mol_type = other DNA
ggtataaattgtgcttgtgt

SEQ ID NO: 679 - DNA, 20 bp, synthetic construct
  source 1..20: mol_type = other DNA
tggtataaattgtgcttgtg

SEQ ID NO: 680 - DNA, 20 bp, synthetic construct
  source 1..20: mol_type = other DNA
gttggtataaattgtgcttg

SEQ ID NO: 681 - DNA, 20 bp, synthetic construct
  source 1..20: mol_type = other DNA
cagttggtataaattgtgct

SEQ ID NO: 682 - DNA, 20 bp, synthetic construct
  source 1..20: mol_type = other DNA
cccaacagttggtataaatt

SEQ ID NO: 683 - DNA, 20 bp, synthetic construct
  source 1..20: mol_type = other DNA
ttacccaacagttggtataa

SEQ ID NO: 684 - DNA, 20 bp, synthetic construct
  source 1..20: mol_type = other DNA
ggttacccaacagttggtat

SEQ ID NO: 685 - DNA, 20 bp, synthetic construct
  source 1..20: mol_type = other DNA
gaagccccatccggttaccc

SEQ ID NO: 686 - DNA, 20 bp, synthetic construct
  source 1..20: mol_type = other DNA
tcgagaagccccatccggtt

SEQ ID NO: 687 - DNA, 20 bp, synthetic construct
  source 1..20: mol_type = other DNA
ccttcgagaagccccatccg

SEQ ID NO: 688 - DNA, 20 bp, synthetic construct
  source 1..20: mol_type = other DNA
tttctccttcgagaagcccc

SEQ ID NO: 689 - DNA, 20 bp, synthetic construct
  source 1..20: mol_type = other DNA
cctttctccttcgagaagcc

SEQ ID NO: 690 - DNA, 20 bp, synthetic construct
  source 1..20: mol_type = other DNA
tcacctttctccttcgagaa

SEQ ID NO: 691 - DNA, 20 bp, synthetic construct
  source 1..20: mol_type = other DNA
ttcacctttctccttcgaga

SEQ ID NO: 692 - DNA, 20 bp, synthetic construct
  source 1..20: mol_type = other DNA
tttggatttcacctttctcc

SEQ ID NO: 693 - DNA, 20 bp, synthetic construct
  source 1..20: mol_type = other DNA
tgtagaatattttggatttc

SEQ ID NO: 694 - DNA, 20 bp, synthetic construct
  source 1..20: mol_type = other DNA
tttgttaccaaaggaatatt

SEQ ID NO: 695 - DNA, 20 bp, synthetic construct
  source 1..20: mol_type = other DNA
catttgttaccaaaggaata

SEQ ID NO: 696 - DNA, 20 bp, synthetic construct
  source 1..20: mol_type = other DNA
tcatttgttaccaaaggaat

SEQ ID NO: 697 - DNA, 20 bp, synthetic construct
  source 1..20: mol_type = other DNA
tcttcatttgttaccaaagg

SEQ ID NO: 698 - DNA, 20 bp, synthetic construct
  source 1..20: mol_type = other DNA
cattcttcatttgttaccaa

SEQ ID NO: 699 - DNA, 20 bp, synthetic construct
  source 1..20: mol_type = other DNA
cttgatatcttttctggcat

SEQ ID NO: 700 - DNA, 20 bp, synthetic construct
  source 1..20: mol_type = other DNA
taatcttgatatcttttctg

SEQ ID NO: 701 - DNA, 20 bp, synthetic construct
  source 1..20: mol_type = other DNA
tataatcttgatatcttttc

SEQ ID NO: 702 - DNA, 20 bp, synthetic construct
  source 1..20: mol_type = other DNA
ttctttatagccagcacaga

SEQ ID NO: 703 - DNA, 20 bp, synthetic construct
  source 1..20: mol_type = other DNA
ccttctttatagccagcaca

SEQ ID NO: 704 - DNA, 20 bp, synthetic construct
  source 1..20: mol_type = other DNA
ccccttctttatagccagca

SEQ ID NO: 705 - DNA, 20 bp, synthetic construct
  source 1..20: mol_type = other DNA
cccccttctttatagccagc

SEQ ID NO: 706 - DNA, 20 bp, synthetic construct
  source 1..20: mol_type = other DNA
tcccccttctttatagccag

SEQ ID NO: 707 - DNA, 20 bp, synthetic construct
  source 1..20: mol_type = other DNA
caagcatcttttcccccttc

SEQ ID NO: 708 - DNA, 20 bp, synthetic construct
  source 1..20: mol_type = other DNA
agggaccacctgaatctccc

SEQ ID NO: 709 - DNA, 20 bp, synthetic construct
  source 1..20: mol_type = other DNA
ctaagggaccacctgaatct

SEQ ID NO: 710 - DNA, 20 bp, synthetic construct
  source 1..20: mol_type = other DNA
actaagggaccacctgaatc

SEQ ID NO: 711 - DNA, 20 bp, synthetic construct
  source 1..20: mol_type = other DNA
caaactaagggaccacctga

SEQ ID NO: 712 - DNA, 20 bp, synthetic construct
  source 1..20: mol_type = other DNA
gcaaactaagggaccacctg

SEQ ID NO: 713 - DNA, 20 bp, synthetic construct
  source 1..20: mol_type = other DNA
tgcaaactaagggaccacct

SEQ ID NO: 714 - DNA, 20 bp, synthetic construct
  source 1..20: mol_type = other DNA
gtgtttgcaaactaagggac

SEQ ID NO: 715 - DNA, 20 bp, synthetic construct
  source 1..20: mol_type = other DNA
tgtgtttgcaaactaaggga

SEQ ID NO: 716 - DNA, 20 bp, synthetic construct
  source 1..20: mol_type = other DNA
ccctgcgggcacagccttca

SEQ ID NO: 717 - DNA, 20 bp, synthetic construct
  source 1..20: mol_type = other DNA
ttgctccctgcgggcacagc

SEQ ID NO: 718 - DNA, 20 bp, synthetic construct
  source 1..20: mol_type = other DNA
caccaggttgctccctgcgg

SEQ ID NO: 719 - DNA, 20 bp, synthetic construct
  source 1..20: mol_type = other DNA
acaccaggttgctccctgcg

SEQ ID NO: 720 - DNA, 20 bp, synthetic construct
  source 1..20: mol_type = other DNA
agacaccaggttgctccctg

SEQ ID NO: 721 - DNA, 20 bp, synthetic construct
  source 1..20: mol_type = other DNA
gtagacaccaggttgctccc

SEQ ID NO: 722 - DNA, 20 bp, synthetic construct
  source 1..20: mol_type = other DNA
ctcagcgactttggtgtaga

SEQ ID NO: 723 - DNA, 20 bp, synthetic construct
  source 1..20: mol_type = other DNA
gtactcagcgactttggtgt

SEQ ID NO: 724 - DNA, 20 bp, synthetic construct
  source 1..20: mol_type = other DNA
catgtactcagcgactttgg

SEQ ID NO: 725 - DNA, 20 bp, synthetic construct
  source 1..20: mol_type = other DNA
cagtccatgtactcagcgac

SEQ ID NO: 726 - DNA, 20 bp, synthetic construct
  source 1..20: mol_type = other DNA
tccagtccatgtactcagcg

SEQ ID NO: 727 - DNA, 20 bp, synthetic construct
  source 1..20: mol_type = other DNA
gcttttccatcactgctctg

SEQ ID NO: 728 - DNA, 20 bp, synthetic construct
  source 1..20: mol_type = other DNA
ctgagcttttccatcactgc

SEQ ID NO: 729 - DNA, 20 bp, synthetic construct
  source 1..20: mol_type = other DNA
tctgagcttttccatcactg

SEQ ID NO: 730 - DNA, 20 bp, synthetic construct
  source 1..20: mol_type = other DNA
gcatctgagcttttccatca

SEQ ID NO: 731 - DNA, 20 bp, synthetic construct
  source 1..20: mol_type = other DNA
actgcatctgagcttttcca

SEQ ID NO: 732 - DNA, 20 bp, synthetic construct
  source 1..20: mol_type = other DNA
tggtgactgcatctgagctt

SEQ ID NO: 733 - DNA, 20 bp, synthetic construct
  source 1..20: mol_type = other DNA
gctggtgactgcatctgagc

SEQ ID NO: 734 - DNA, 20 bp, synthetic construct
  source 1..20: mol_type = other DNA
atgctggtgactgcatctga

SEQ ID NO: 735 - DNA, 20 bp, synthetic construct
  source 1..20: mol_type = other DNA
tcatgctggtgactgcatct

SEQ ID NO: 736 - DNA, 20 bp, synthetic construct
  source 1..20: mol_type = other DNA
cttctcatgctggtgactgc

SEQ ID NO: 737 - DNA, 20 bp, synthetic construct
  source 1..20: mol_type = other DNA
actgcttctcatgctggtga

SEQ ID NO: 738 - DNA, 20 bp, synthetic construct
  source 1..20: mol_type = other DNA
ggactgcttctcatgctggt

SEQ ID NO: 739 - DNA, 20 bp, synthetic construct
  source 1..20: mol_type = other DNA
ctggactgcttctcatgctg

SEQ ID NO: 740 - DNA, 20 bp, synthetic construct
  source 1..20: mol_type = other DNA
ctctggactgcttctcatgc

SEQ ID NO: 741 - DNA, 20 bp, synthetic construct
  source 1..20: mol_type = other DNA
agactctggactgcttctca

SEQ ID NO: 742 - DNA, 20 bp, synthetic construct
  source 1..20: mol_type = other DNA
cctagactctggactgcttc

SEQ ID NO: 743 - DNA, 20 bp, synthetic construct
  source 1..20: mol_type = other DNA
tgcctagactctggactgct

SEQ ID NO: 744 - DNA, 20 bp, synthetic construct
  source 1..20: mol_type = other DNA
attgcctagactctggactg

SEQ ID NO: 745 - DNA, 20 bp, synthetic construct
  source 1..20: mol_type = other DNA
aaaaattgcctagactctgg

SEQ ID NO: 746 - DNA, 20 bp, synthetic construct
  source 1..20: mol_type = other DNA
ggttgtaaaaattgcctaga

SEQ ID NO: 747 - DNA, 20 bp, synthetic construct
  source 1..20: mol_type = other DNA
tcaggttgtaaaaattgcct

SEQ ID NO: 748 - DNA, 20 bp, synthetic construct
  source 1..20: mol_type = other DNA
ctcaggttgtaaaaattgcc

SEQ ID NO: 749 - DNA, 20 bp, synthetic construct
  source 1..20: mol_type = other DNA
actcaggttgtaaaaattgc

SEQ ID NO: 750 - DNA, 20 bp, synthetic construct
  source 1..20: mol_type = other DNA
gaactcaggttgtaaaaatt

SEQ ID NO: 751 - DNA, 20 bp, synthetic construct
  source 1..20: mol_type = other DNA
acttgaactcaggttgtaaa

SEQ ID NO: 752 - DNA, 20 bp, synthetic construct
  source 1..20: mol_type = other DNA
gacttgaactcaggttgtaa

SEQ ID NO: 753 - DNA, 20 bp, synthetic construct
  source 1..20: mol_type = other DNA
gaatttgacttgaactcagg

SEQ ID NO: 754 - DNA, 20 bp, synthetic construct
  source 1..20: mol_type = other DNA
ctcagaatttgacttgaact

SEQ ID NO: 755 - DNA, 20 bp, synthetic construct
  source 1..20: mol_type = other DNA
aggctcagaatttgacttga

SEQ ID NO: 756 - DNA, 20 bp, synthetic construct
  source 1..20: mol_type = other DNA
caggctcagaatttgacttg

SEQ ID NO: 757 - DNA, 20 bp, synthetic construct
  source 1..20: mol_type = other DNA
ccaggctcagaatttgactt

SEQ ID NO: 758 - DNA, 20 bp, synthetic construct
  source 1..20: mol_type = other DNA
ccccaggctcagaatttgac

SEQ ID NO: 759 - DNA, 20 bp, synthetic construct
  source 1..20: mol_type = other DNA
ccccccaggctcagaatttg

SEQ ID NO: 760 - DNA, 20 bp, synthetic construct
  source 1..20: mol_type = other DNA
gaccccccaggctcagaatt

SEQ ID NO: 761 - DNA, 20 bp, synthetic construct
  source 1..20: mol_type = other DNA
atgaggaccccccaggctca

SEQ ID NO: 762 - DNA, 20 bp, synthetic construct
  source 1..20: mol_type = other DNA
gatgaggaccccccaggctc

SEQ ID NO: 763 - DNA, 20 bp, synthetic construct
  source 1..20: mol_type = other DNA
gcagatgaggaccccccagg

SEQ ID NO: 764 - DNA, 20 bp, synthetic construct
  source 1..20: mol_type = other DNA
tgcagatgaggaccccccag

SEQ ID NO: 765 - DNA, 20 bp, synthetic construct
  source 1..20: mol_type = other DNA
tttgcagatgaggacccccc

SEQ ID NO: 766 - DNA, 20 bp, synthetic construct
  source 1..20: mol_type = other DNA
ctccatgctttgcagatgag

SEQ ID NO: 767 - DNA, 20 bp, synthetic construct
  source 1..20: mol_type = other DNA
gccactctccatgctttgca

SEQ ID NO: 768 - DNA, 20 bp, synthetic construct
  source 1..20: mol_type = other DNA
agatgccactctccatgctt

SEQ ID NO: 769 - DNA, 20 bp, synthetic construct
  source 1..20: mol_type = other DNA
gaagatgccactctccatgc

SEQ ID NO: 770 - DNA, 20 bp, synthetic construct
  source 1..20: mol_type = other DNA
agaagatgccactctccatg

SEQ ID NO: 771 - DNA, 20 bp, synthetic construct
  source 1..20: mol_type = other DNA
caaagaagatgccactctcc

SEQ ID NO: 772 - DNA, 20 bp, synthetic construct
  source 1..20: mol_type = other DNA
gatgcaaagaagatgccact

SEQ ID NO: 773 - DNA, 20 bp, synthetic construct
  source 1..20: mol_type = other DNA
ggatgcaaagaagatgccac

SEQ ID NO: 774 - DNA, 20 bp, synthetic construct
  source 1..20: mol_type = other DNA
taggatgcaaagaagatgcc

SEQ ID NO: 775 - DNA, 20 bp, synthetic construct
  source 1..20: mol_type = other DNA
tccttaggatgcaaagaaga

SEQ ID NO: 776 - DNA, 20 bp, synthetic construct
  source 1..20: mol_type = other DNA
cgtccttaggatgcaaagaa

SEQ ID NO: 777 - DNA, 20 bp, synthetic construct
  source 1..20: mol_type = other DNA
attgtcctcagcagctctga

SEQ ID NO: 778 - DNA, 20 bp, synthetic construct
  source 1..20: mol_type = other DNA
ccagacattgtcctcagcag

SEQ ID NO: 779 - DNA, 20 bp, synthetic construct
  source 1..20: mol_type = other DNA
agccagacattgtcctcagc

SEQ ID NO: 780 - DNA, 20 bp, synthetic construct
  source 1..20: mol_type = other DNA
tcagccagacattgtcctca

SEQ ID NO: 781 - DNA, 20 bp, synthetic construct
  source 1..20: mol_type = other DNA
cttcagccagacattgtcct

SEQ ID NO: 782 - DNA, 20 bp, synthetic construct
  source 1..20: mol_type = other DNA
agcgggcttcagccagacat

SEQ ID NO: 783 - DNA, 20 bp, synthetic construct
  source 1..20: mol_type = other DNA
gaaagcgggcttcagccaga

SEQ ID NO: 784 - DNA, 20 bp, synthetic construct
  source 1..20: mol_type = other DNA
ctgaaagcgggcttcagcca

SEQ ID NO: 785 - DNA, 20 bp, synthetic construct
  source 1..20: mol_type = other DNA
cgtgctgaaagcgggcttca

SEQ ID NO: 786 - DNA, 20 bp, synthetic construct
  source 1..20: mol_type = other DNA
gtcagcccctggttacggcg

SEQ ID NO: 787 - DNA, 20 bp, synthetic construct
  source 1..20: mol_type = other DNA
ttgtcagcccctggttacgg

SEQ ID NO: 788 - DNA, 20 bp, synthetic construct
  source 1..20: mol_type = other DNA
cattgtcagcccctggttac

SEQ ID NO: 789 - DNA, 20 bp, synthetic construct
  source 1..20: mol_type = other DNA
gcattgtcagcccctggtta

SEQ ID NO: 790 - DNA, 20 bp, synthetic construct
  source 1..20: mol_type = other DNA
cctcgcattgtcagcccctg

SEQ ID NO: 791 - DNA, 20 bp, synthetic construct
  source 1..20: mol_type = other DNA
gacctcgcattgtcagcccc

SEQ ID NO: 792 - DNA, 20 bp, synthetic construct
  source 1..20: mol_type = other DNA
gcgacctcgcattgtcagcc

SEQ ID NO: 793 - DNA, 20 bp, synthetic construct
  source 1..20: mol_type = other DNA
ctcagttgcgacctcgcatt

SEQ ID NO: 794 - DNA, 20 bp, synthetic construct
  source 1..20: mol_type = other DNA
tctcagttgcgacctcgcat

SEQ ID NO: 795 - DNA, 20 bp, synthetic construct
  source 1..20: mol_type = other DNA
gtcatggagatctcagttgc

SEQ ID NO: 796 - DNA, 20 bp, synthetic construct
  source 1..20: mol_type = other DNA
cacagtcatggagatctcag

SEQ ID NO: 797 - DNA, 20 bp, synthetic construct
  source 1..20: mol_type = other DNA
ccatgaacatcctatccgtg

SEQ ID NO: 798 - DNA, 20 bp, synthetic construct
  source 1..20: mol_type = other DNA
tgtcctgtcaacatattcca

SEQ ID NO: 799 - DNA, 20 bp, synthetic construct
  source 1..20: mol_type = other DNA
gggtttctgccaacagtttc

SEQ ID NO: 800 - DNA, 20 bp, synthetic construct
  source 1..20: mol_type = other DNA
gactttgggtttctgccaac

SEQ ID NO: 801 - DNA, 20 bp, synthetic construct
  source 1..20: mol_type = other DNA
atattgactttgggtttctg

SEQ ID NO: 802 - DNA, 20 bp, synthetic construct
  source 1..20: mol_type = other DNA
ggcttcaatattgactttgg

SEQ ID NO: 803 - DNA, 20 bp, synthetic construct
  source 1..20: mol_type = other DNA
ctgcaggcaatattttgctt

SEQ ID NO: 804 - DNA, 20 bp, synthetic construct
  source 1..20: mol_type = other DNA
atgtggcactgcaggcaata

SEQ ID NO: 805 - DNA, 20 bp, synthetic construct
  source 1..20: mol_type = other DNA
ttctaatgtggcactgcagg

SEQ ID NO: 806 - DNA, 20 bp, synthetic construct
  source 1..20: mol_type = other DNA
tcaagctgttctaatgtggc

SEQ ID NO: 807 - DNA, 20 bp, synthetic construct
  source 1..20: mol_type = other DNA
acggtcttcaagctgttcta

SEQ ID NO: 808 - DNA, 20 bp, synthetic construct
  source 1..20: mol_type = other DNA
ggtcaatctgactagtgaat

SEQ ID NO: 809 - DNA, 20 bp, synthetic construct
  source 1..20: mol_type = other DNA
tctctggtcaatctgactag

SEQ ID NO: 810 - DNA, 20 bp, synthetic construct
  source 1..20: mol_type = other DNA
gcccaccaacaatctctggt

SEQ ID NO: 811 - DNA, 20 bp, synthetic construct
  source 1..20: mol_type = other DNA
gaccccaacagacagcccac

SEQ ID NO: 812 - DNA, 20 bp, synthetic construct
  source 1..20: mol_type = other DNA
ccagaatcatgccttgtggg

SEQ ID NO: 813 - DNA, 20 bp, synthetic construct
  source 1..20: mol_type = other DNA
gtcaccatagacccagaatc

SEQ ID NO: 814 - DNA, 20 bp, synthetic construct
  source 1..20: mol_type = other DNA
gtggccctcttaagtcacca

SEQ ID NO: 815 - DNA, 20 bp, synthetic construct
  source 1..20: mol_type = other DNA
ctcattgttgtgtggccctc

SEQ ID NO: 816 - DNA, 20 bp, synthetic construct
  source 1..20: mol_type = other DNA
gtagccatacatctgaggaa

SEQ ID NO: 817 - DNA, 20 bp, synthetic construct
  source 1..20: mol_type = other DNA
atgtttattgtagccataca

SEQ ID NO: 818 - DNA, 20 bp, synthetic construct
  source 1..20: mol_type = other DNA
ctcgcctttgtgactcgatt

SEQ ID NO: 819 - DNA, 20 bp, synthetic construct
  source 1..20: mol_type = other DNA
catactcgcctttgtgactc

SEQ ID NO: 820 - DNA, 20 bp, synthetic construct
  source 1..20: mol_type = other DNA
gcatactcgcctttgtgact

SEQ ID NO: 821 - DNA, 20 bp, synthetic construct
  source 1..20: mol_type = other DNA
tgcatactcgcctttgtgac

SEQ ID NO: 822 - DNA, 20 bp, synthetic construct
  source 1..20: mol_type = other DNA
ttcacaacacacagtcatgg

SEQ ID NO: 823 - DNA, 20 bp, synthetic construct
  source 1..20: mol_type = other DNA
ttttttgatctttcaccatt

SEQ ID NO: 824 - DNA, 20 bp, synthetic construct
  source 1..20: mol_type = other DNA
atgcatactcgcctttgtga

SEQ ID NO: 825 - DNA, 20 bp, synthetic construct
  source 1..20: mol_type = other DNA
catgcatactcgcctttgtg

SEQ ID NO: 826 - DNA, 20 bp, synthetic construct
  source 1..20: mol_type = other DNA
ccatgcatactcgcctttgt

SEQ ID NO: 827 - DNA, 20 bp, synthetic construct
  source 1..20: mol_type = other DNA
acacacagtcatggagatct

SEQ ID NO: 828 - DNA, 20 bp, synthetic construct
  source 1..20: mol_type = other DNA
acaacacacagtcatggaga

SEQ ID NO: 829 - DNA, 20 bp, synthetic construct
  source 1..20: mol_type = other DNA
ttatttcacaacacacagtc

SEQ ID NO: 830 - DNA, 20 bp, synthetic construct
  source 1..20: mol_type = other DNA
tccatgcatactcgcctttg

SEQ ID NO: 831 - DNA, 20 bp, synthetic construct
  source 1..20: mol_type = other DNA
ttccatgcatactcgccttt

SEQ ID NO: 832 - DNA, 20 bp, synthetic construct
  source 1..20: mol_type = other DNA
tttccatgcatactcgcctt

SEQ ID NO: 833 - DNA, 20 bp, synthetic construct
  source 1..20: mol_type = other DNA
gattttccatgcatactcgc

SEQ ID NO: 834 - DNA, 20 bp, synthetic construct
  source 1..20: mol_type = other DNA
gtgatgcgattttccatgca

SEQ ID NO: 835 - DNA, 20 bp, synthetic construct
  source 1..20: mol_type = other DNA
gcagcaagtgctccccatgc

SEQ ID NO: 836 - DNA, 20 bp, synthetic construct
  source 1..20: mol_type = other DNA
gtgatgaaagtacagcagca

SEQ ID NO: 837 - DNA, 20 bp, synthetic construct
  source 1..20: mol_type = other DNA
tcctatccgtgttcagctgt

SEQ ID NO: 838 - DNA, 20 bp, synthetic construct
  source 1..20: mol_type = other DNA
tactctctacatactcagga

SEQ ID NO: 839 - DNA, 20 bp, synthetic construct
  source 1..20: mol_type = other DNA
tgagacctccagactactgt

SEQ ID NO: 840 - DNA, 20 bp, synthetic construct
  source 1..20: mol_type = other DNA
ctctgctggttttagaccac

SEQ ID NO: 841 - DNA, 20 bp, synthetic construct
  source 1..20: mol_type = other DNA
gggacaatctccacccccga

SEQ ID NO: 842 - DNA, 20 bp, synthetic construct
  source 1..20: mol_type = other DNA
tgcagagtgtcatctgcgaa

SEQ ID NO: 843 - DNA, 20 bp, synthetic construct
  source 1..20: mol_type = other DNA
tggttccctagcggtccaga

SEQ ID NO: 844 - DNA, 20 bp, synthetic construct
  source 1..20: mol_type = other DNA
cccctgtagttggctgtggt

SEQ ID NO: 845 - DNA, 20 bp, synthetic construct
  source 1..20: mol_type = other DNA
gcaagtcaaagagtgtccac

SEQ ID NO: 846 - DNA, 20 bp, synthetic construct
  source 1..20: mol_type = other DNA
gaagcctgttagagttggcc

SEQ ID NO: 847 - DNA, 20 bp, synthetic construct
  source 1..20: mol_type = other DNA
cccccatgtccatggacttt

SEQ ID NO: 848 - DNA, 20 bp, synthetic construct
  source 1..20: mol_type = other DNA
ctgccaacagtttcaacttt

SEQ ID NO: 849 - DNA, 20 bp, synthetic construct
  source 1..20: mol_type = other DNA
ttttgcttggcttcaatatt

SEQ ID NO: 850 - DNA, 20 bp, synthetic construct
  source 1..20: mol_type = other DNA
atctgactagtgaatggctt

SEQ ID NO: 851 - DNA, 20 bp, synthetic construct
  source 1..20: mol_type = other DNA
agacagcccaccaacaatct

SEQ ID NO: 852 - DNA, 20 bp, synthetic construct
  source 1..20: mol_type = other DNA
tgcatagaccccaacagaca

SEQ ID NO: 853 - DNA, 20 bp, synthetic construct
  source 1..20: mol_type = other DNA
cctgtgcatagaccccaaca

SEQ ID NO: 854 - DNA, 20 bp, synthetic construct
  source 1..20: mol_type = other DNA
ccagcagaaatcctgtgcat

SEQ ID NO: 855 - DNA, 20 bp, synthetic construct
  source 1..20: mol_type = other DNA
agaactccagcagaaatcct

SEQ ID NO: 856 - DNA, 20 bp, synthetic construct
  source 1..20: mol_type = other DNA
ttgtgtggccctcttaagtc

SEQ ID NO: 857 - DNA, 20 bp, synthetic construct
  source 1..20: mol_type = other DNA
tatagatgtttattgtagcc

SEQ ID NO: 858 - DNA, 20 bp, synthetic construct
  source 1..20: mol_type = other DNA
atactcgcctttgtgactcg

SEQ ID NO: 859 - DNA, 20 bp, synthetic construct
  source 1..20: mol_type = other DNA
ttttccatgcatactcgcct

SEQ ID NO: 860 - DNA, 20 bp, synthetic construct
  source 1..20: mol_type = other DNA
tcgcctttgtgatgcgattt

SEQ ID NO: 861 - DNA, 20 bp, synthetic construct
  source 1..20: mol_type = other DNA
atactcgcctttgtgatgcg

SEQ ID NO: 862 - DNA, 20 bp, synthetic construct
  source 1..20: mol_type = other DNA
catactcgcctttgtgatgc

SEQ ID NO: 863 - DNA, 20 bp, synthetic construct
  source 1..20: mol_type = other DNA
gcatactcgcctttgtgatg

SEQ ID NO: 864 - DNA, 20 bp, synthetic construct
  source 1..20: mol_type = other DNA
tgcatactcgcctttgtgat

SEQ ID NO: 865 - DNA, 20 bp, synthetic construct
  source 1..20: mol_type = other DNA
cccatgcatactcgcctttg

SEQ ID NO: 866 - DNA, 20 bp, synthetic construct
  source 1..20: mol_type = other DNA
ccccatgcatactcgccttt

SEQ ID NO: 867 - DNA, 20 bp, synthetic construct
  source 1..20: mol_type = other DNA
tccccatgcatactcgcctt

SEQ ID NO: 868 - DNA, 20 bp, synthetic construct
  source 1..20: mol_type = other DNA
ctccccatgcatactcgcct

SEQ ID NO: 869 - DNA, 20 bp, synthetic construct
  source 1..20: mol_type = other DNA
tgctccccatgcatactcgc

SEQ ID NO: 870 - DNA, 20 bp, synthetic construct
  source 1..20: mol_type = other DNA
gctctgattgggtcaccaca

SEQ ID NO: 871 - DNA, 20 bp, synthetic construct
  source 1..20: mol_type = other DNA
tgtctccttccacttgctcc

SEQ ID NO: 872 - DNA, 20 bp, synthetic construct
  source 1..20: mol_type = other DNA
gccattttatccctgagatt

SEQ ID NO: 873 - DNA, 20 bp, synthetic construct
  source 1..20: mol_type = other DNA
ctgtgctgtattttggagcc

SEQ ID NO: 874 - DNA, 20 bp, synthetic construct
  source 1..20: mol_type = other DNA
ggatttggccctgagcccca

SEQ ID NO: 875 - DNA, 20 bp, synthetic construct
  source 1..20: mol_type = other DNA
caacctgtccattccctggg

SEQ ID NO: 876 - DNA, 20 bp, synthetic construct
  source 1..20: mol_type = other DNA
attcggtgtctttactggct

SEQ ID NO: 877 - DNA, 20 bp, synthetic construct
  source 1..20: mol_type = other DNA
tcctgttgcctgacatgcta

SEQ ID NO: 878 - DNA, 20 bp, synthetic construct
  source 1..20: mol_type = other DNA
ctcccactgactgactactc

SEQ ID NO: 879 - DNA, 20 bp, synthetic construct
  source 1..20: mol_type = other DNA
gctggtccttgaaccccgtg

SEQ ID NO: 880 - DNA, 20 bp, synthetic construct
  source 1..20: mol_type = other DNA
ctggctcactataggcccca

SEQ ID NO: 881 - DNA, 20 bp, synthetic construct
  source 1..20: mol_type = other DNA
ataagcatctctctgaccta

SEQ ID NO: 882 - DNA, 20 bp, synthetic construct
  source 1..20: mol_type = other DNA
gcttccccaatacttgctgg

SEQ ID NO: 883 - DNA, 20 bp, synthetic construct
  source 1..20: mol_type = other DNA
gtgtccagaatactgcccca

SEQ ID NO: 884 - DNA, 20 bp, synthetic construct
  source 1..20: mol_type = other DNA
gtggacgactgccctgtgcc

SEQ ID NO: 885 - DNA, 20 bp, synthetic construct
  source 1..20: mol_type = other DNA
tctctagcatcctagtcctc

SEQ ID NO: 886 - DNA, 20 bp, synthetic construct
  source 1..20: mol_type = other DNA
atactggctaagtcaggccc

SEQ ID NO: 887 - DNA, 20 bp, synthetic construct
  source 1..20: mol_type = other DNA
ggcagggaggtggattattc

SEQ ID NO: 888 - DNA, 20 bp, synthetic construct
  source 1..20: mol_type = other DNA
gcttctctatctcccagtgt

SEQ ID NO: 889 - DNA, 20 bp, synthetic construct
  source 1..20: mol_type = other DNA
gatgcatgcagcaatacagg

SEQ ID NO: 890 - DNA, 20 bp, synthetic construct
  source 1..20: mol_type = other DNA
gtctcgatggcaagctgtac

SEQ ID NO: 891 - DNA, 20 bp, synthetic construct
  source 1..20: mol_type = other DNA
gtactcaccggtactctgcc

SEQ ID NO: 892 - DNA, 20 bp, synthetic construct
  source 1..20: mol_type = other DNA
atgaagggcgaggcgcagtg

SEQ ID NO: 893 - DNA, 20 bp, synthetic construct
  source 1..20: mol_type = other DNA
ccccatacatctatgcaaat

SEQ ID NO: 894 - DNA, 20 bp, synthetic construct
  source 1..20: mol_type = other DNA
acatgactccagtgatggat

SEQ ID NO: 895 - DNA, 20 bp, synthetic construct
  source 1..20: mol_type = other DNA
aaaatgacaccaaaattcgc

SEQ ID NO: 896 - DNA, 20 bp, synthetic construct
  source 1..20: mol_type = other DNA
tggacatccttcccctcgca

SEQ ID NO: 897 - DNA, 20 bp, synthetic construct
  source 1..20: mol_type = other DNA
gctctgagccttccgcctct

SEQ ID NO: 898 - DNA, 20 bp, synthetic construct
  source 1..20: mol_type = other DNA
actagtttcctataactgct

SEQ ID NO: 899 - DNA, 20 bp, synthetic construct
  source 1..20: mol_type = other DNA
tactagtttcctataactgc

SEQ ID NO: 900 - DNA, 20 bp, synthetic construct
  source 1..20: mol_type = other DNA
gtactagtttcctataactg

SEQ ID NO: 901 - DNA, 20 bp, synthetic construct
  source 1..20: mol_type = other DNA
gtatcactgtactagtttcc

SEQ ID NO: 902 - DNA, 20 bp, synthetic construct
  source 1..20: mol_type = other DNA
agtatcactgtactagtttc

SEQ ID NO: 903 - DNA, 20 bp, synthetic construct
  source 1..20: mol_type = other DNA
cagtatcactgtactagttt

SEQ ID NO: 904 - DNA, 20 bp, synthetic construct
  source 1..20: mol_type = other DNA
acagtatcactgtactagtt

SEQ ID NO: 905 - DNA, 20 bp, synthetic construct
  source 1..20: mol_type = other DNA
aacagtatcactgtactagt

SEQ ID NO: 906 - DNA, 20 bp, synthetic construct
  source 1..20: mol_type = other DNA
taacagtatcactgtactag

SEQ ID NO: 907 - DNA, 20 bp, synthetic construct
  source 1..20: mol_type = other DNA
tctaacagtatcactgtact

SEQ ID NO: 908 - DNA, 20 bp, synthetic construct
  source 1..20: mol_type = other DNA
ctctaacagtatcactgtac

SEQ ID NO: 909 - DNA, 20 bp, synthetic construct
  source 1..20: mol_type = other DNA
actctaacagtatcactgta

SEQ ID NO: 910 - DNA, 20 bp, synthetic construct
  source 1..20: mol_type = other DNA
aactctaacagtatcactgt

SEQ ID NO: 911 - DNA, 20 bp, synthetic construct
  source 1..20: mol_type = other DNA
taactctaacagtatcactg

SEQ ID NO: 912 - DNA, 20 bp, synthetic construct
  source 1..20: mol_type = other DNA
ataactctaacagtatcact

SEQ ID NO: 913 - DNA, 20 bp, synthetic construct
  source 1..20: mol_type = other DNA
tataactctaacagtatcac

SEQ ID NO: 914 - DNA, 20 bp, synthetic construct
  source 1..20: mol_type = other DNA
ctataactctaacagtatca

SEQ ID NO: 915 - DNA, 20 bp, synthetic construct
  source 1..20: mol_type = other DNA
cctataactctaacagtatc

SEQ ID NO: 916 - DNA, 20 bp, synthetic construct
  source 1..20: mol_type = other DNA
ctgtcctataactctaacag

SEQ ID NO: 917 - DNA, 20 bp, synthetic construct
  source 1..20: mol_type = other DNA
cactgtcctataactctaac

SEQ ID NO: 918 - DNA, 20 bp, synthetic construct
  source 1..20: mol_type = other DNA
tcactgtcctataactctaa

SEQ ID NO: 919 - DNA, 20 bp, synthetic construct
  source 1..20: mol_type = other DNA
tatcactgtcctataactct

SEQ ID NO: 920 - DNA, 20 bp, synthetic construct
  source 1..20: mol_type = other DNA
gtcctatatcactgtcctat

SEQ ID NO: 921 - DNA, 20 bp, synthetic construct
  source 1..20: mol_type = other DNA
tgtcctatatcactgtccta

SEQ ID NO: 922 - DNA, 20 bp, synthetic construct
  source 1..20: mol_type = other DNA
ctgtcctatatcactgtcct

SEQ ID NO: 923 - DNA, 20 bp, synthetic construct
  source 1..20: mol_type = other DNA
actgtcctatatcactgtcc

SEQ ID NO: 924 - DNA, 20 bp, synthetic construct
  source 1..20: mol_type = other DNA
tcactgtcctatatcactgt

SEQ ID NO: 925 - DNA, 20 bp, synthetic construct
  source 1..20: mol_type = other DNA
cccccagttcccatgcaagg

SEQ ID NO: 926 - DNA, 20 bp, synthetic construct
  source 1..20: mol_type = other DNA
gagcacagatctcttcaagt

SEQ ID NO: 927 - DNA, 20 bp, synthetic construct
  source 1..20: mol_type = other DNA
gacggtcacccagccctgac

SEQ ID NO: 928 - DNA, 20 bp, synthetic construct
  source 1..20: mol_type = other DNA
aagggaaattagaggcaggc

SEQ ID NO: 929 - DNA, 20 bp, synthetic construct
  source 1..20: mol_type = other DNA
ctttcttgagacaatccctt

SEQ ID NO: 930 - DNA, 20 bp, synthetic construct
  source 1..20: mol_type = other DNA
gtgggatcagagaatgacta

SEQ ID NO: 931 - DNA, 20 bp, synthetic construct
  source 1..20: mol_type = other DNA
ccctctgtcttagatgtcca

SEQ ID NO: 932 - DNA, 20 bp, synthetic construct
  source 1..20: mol_type = other DNA
cttatcagtcccagtcatgt

SEQ ID NO: 933 - DNA, 20 bp, synthetic construct
  source 1..20: mol_type = other DNA
aagagttgggatgcgactct

SEQ ID NO: 934 - DNA, 20 bp, synthetic construct
  source 1..20: mol_type = other DNA
tccactcctaagaagtatgg

SEQ ID NO: 935 - DNA, 20 bp, synthetic construct
  source 1..20: mol_type = other DNA
gcacccttttcattgagatt

SEQ ID NO: 936 - DNA, 20 bp, synthetic construct
  source 1..20: mol_type = other DNA
actaccatttgggttggtag

SEQ ID NO: 937 - DNA, 20 bp, synthetic construct
  source 1..20: mol_type = other DNA
aagccctgtttggtttttag

SEQ ID NO: 938 - DNA, 20 bp, synthetic construct
  source 1..20: mol_type = other DNA
aaatgacaccaaaattgagt

SEQ ID NO: 939 - DNA, 20 bp, synthetic construct
  source 1..20: mol_type = other DNA
aaatgacaccaaaattcgct

SEQ ID NO: 940 - DNA, 20 bp, synthetic construct
  source 1..20: mol_type = other DNA
taagcaaggcctatgtgtgg

SEQ ID NO: 941 - DNA, 20 bp, synthetic construct
  source 1..20: mol_type = other DNA
acacgcacaggtcccagggc

SEQ ID NO: 942 - DNA, 20 bp, synthetic construct
  source 1..20: mol_type = other DNA
gggaaactctttcctcgccc

SEQ ID NO: 943 - DNA, 20 bp, synthetic construct
  source 1..20: mol_type = other DNA
ctagtttcctataactgctg

SEQ ID NO: 944 - DNA, 20 bp, synthetic construct
  source 1..20: mol_type = other DNA
ctaacagtatcactgtacta

SEQ ID NO: 945 - DNA, 20 bp, synthetic construct
  source 1..20: mol_type = other DNA
gtcctataactctaacagta

SEQ ID NO: 946 - DNA, 20 bp, synthetic construct
  source 1..20: mol_type = other DNA
tgtcctataactctaacagt

SEQ ID NO: 947 - DNA, 20 bp, synthetic construct
  source 1..20: mol_type = other DNA
atcactgtcctataactcta

SEQ ID NO: 948 - DNA, 20 bp, synthetic construct
  source 1..20: mol_type = other DNA
atatcactgtcctataactc

SEQ ID NO: 949 - DNA, 20 bp, synthetic construct
  source 1..20: mol_type = other DNA
tatatcactgtcctataact

SEQ ID NO: 950 - DNA, 20 bp, synthetic construct
  source 1..20: mol_type = other DNA
cactgtcctatatcactgtc

SEQ ID NO: 951 - DNA, 20 bp, synthetic construct
  source 1..20: mol_type = other DNA
atcactgtcctatatcactg

SEQ ID NO: 952 - DNA, 20 bp, synthetic construct
  source 1..20: mol_type = other DNA
tatcactgtcctatatcact

SEQ ID NO: 953 - DNA, 20 bp, synthetic construct
  source 1..20: mol_type = other DNA
agtatcactgtcctatatca

SEQ ID NO: 954 - DNA, 20 bp, synthetic construct
  source 1..20: mol_type = other DNA
cagtatcactgtcctatatc

SEQ ID NO: 955 - DNA, 20 bp, synthetic construct
  source 1..20: mol_type = other DNA
acagtatcactgtcctatat

SEQ ID NO: 956 - DNA, 20 bp, synthetic construct
  source 1..20: mol_type = other DNA
taacagtatcactgtcctat

SEQ ID NO: 957 - DNA, 20 bp, synthetic construct
  source 1..20: mol_type = other DNA
ataacagtatcactgtccta

SEQ ID NO: 958 - DNA, 20 bp, synthetic construct
  source 1..20: mol_type = other DNA
aactataacagtatcactgt

SEQ ID NO: 959 - DNA, 20 bp, synthetic construct
  source 1..20: mol_type = other DNA
tataactataacagtatcac

SEQ ID NO: 960 - DNA, 20 bp, synthetic construct
  source 1..20: mol_type = other DNA
ctataactataacagtatca

SEQ ID NO: 961 - DNA, 20 bp, synthetic construct
  source 1..20: mol_type = other DNA
tttcctataactataacagt

SEQ ID NO: 962 - DNA, 20 bp, synthetic construct
  source 1..20: mol_type = other DNA
ctagtttcctataactataa

SEQ ID NO: 963 - DNA, 20 bp, synthetic construct
  source 1..20: mol_type = other DNA
taacaatatcactgtcctat

SEQ ID NO: 964 - DNA, 20 bp, synthetic construct
  source 1..20: mol_type = other DNA
aactataacaatatcactgt

SEQ ID NO: 965 - DNA, 20 bp, synthetic construct
  source 1..20: mol_type = other DNA
taactataacaatatcactg

SEQ ID NO: 966 - DNA, 20 bp, synthetic construct
  source 1..20: mol_type = other DNA
ataactataacaatatcact

SEQ ID NO: 967 - DNA, 20 bp, synthetic construct
  source 1..20: mol_type = other DNA
tataactataacaatatcac

SEQ ID NO: 968 - DNA, 20 bp, synthetic construct
  source 1..20: mol_type = other DNA
gtttcctataactataacaa

SEQ ID NO: 969 - DNA, 20 bp, synthetic construct
  source 1..20: mol_type = other DNA
acctataactctaacagtat

SEQ ID NO: 970 - DNA, 20 bp, synthetic construct
  source 1..20: mol_type = other DNA
tacctataactctaacagta

SEQ ID NO: 971 - DNA, 20 bp, synthetic construct
  source 1..20: mol_type = other DNA
tgtacctataactctaacag

SEQ ID NO: 972 - DNA, 20 bp, synthetic construct
  source 1..20: mol_type = other DNA
ctgtacctataactctaaca

SEQ ID NO: 973 - DNA, 20 bp, synthetic construct
  source 1..20: mol_type = other DNA
actgtacctataactctaac

SEQ ID NO: 974 - DNA, 20 bp, synthetic construct
  source 1..20: mol_type = other DNA
cactgtacctataactctaa

SEQ ID NO: 975 - DNA, 20 bp, synthetic construct
  source 1..20: mol_type = other DNA
caatatcactgtacctataa

SEQ ID NO: 976 - DNA, 20 bp, synthetic construct
  source 1..20: mol_type = other DNA
ataacaatatcactgtacct

SEQ ID NO: 977 - DNA, 20 bp, synthetic construct
  source 1..20: mol_type = other DNA
actataacaatatcactgta

SEQ ID NO: 978 - DNA, 20 bp, synthetic construct
  source 1..20: mol_type = other DNA
gtcctatatcactgtacctg

SEQ ID NO: 979 - DNA, 20 bp, synthetic construct
  source 1..20: mol_type = other DNA
cactgtcctatatcactgta

SEQ ID NO: 980 - DNA, 20 bp, synthetic construct
  source 1..20: mol_type = other DNA
cctataacagtatcactgtc

SEQ ID NO: 981 - DNA, 20 bp, synthetic construct
  source 1..20: mol_type = other DNA
tttcctataacagtatcact

SEQ ID NO: 982 - DNA, 20 bp, synthetic construct
  source 1..20: mol_type = other DNA
gtttcctataacagtatcac

SEQ ID NO: 983 - DNA, 20 bp, synthetic construct
  source 1..20: mol_type = other DNA
agtttcctataacagtatca

SEQ ID NO: 984 - DNA, 20 bp, synthetic construct
  source 1..20: mol_type = other DNA
tagtttcctataacagtatc

SEQ ID NO: 985 - DNA, 20 bp, synthetic construct
  source 1..20: mol_type = other DNA
ctagtttcctataacagtat

SEQ ID NO: 986 - DNA, 20 bp, synthetic construct
  source 1..20: mol_type = other DNA
actagtttcctataacagta

SEQ ID NO: 987 - DNA, 20 bp, synthetic construct
  source 1..20: mol_type = other DNA
gtatcactgtcctatatcac

SEQ ID NO: 988 - DNA, 20 bp, synthetic construct
  source 1..20: mol_type = other DNA
aacagtatcactgtcctata

SEQ ID NO: 989 - DNA, 20 bp, synthetic construct
  source 1..20: mol_type = other DNA
tataacagtatcactgtcct

SEQ ID NO: 990 - DNA, 20 bp, synthetic construct
  source 1..20: mol_type = other DNA
ctataacagtatcactgtcc

SEQ ID NO: 991 - DNA, 20 bp, synthetic construct
  source 1..20: mol_type = other DNA
actataacagtatcactgtc

SEQ ID NO: 992 - DNA, 20 bp, synthetic construct
  source 1..20: mol_type = other DNA
taactataacagtatcactg

SEQ ID NO: 993 - DNA, 20 bp, synthetic construct
  source 1..20: mol_type = other DNA
ataactataacagtatcact

SEQ ID NO: 994 - DNA, 20 bp, synthetic construct
  source 1..20: mol_type = other DNA
cctataactataacagtatc

SEQ ID NO: 995 - DNA, 20 bp, synthetic construct
  source 1..20: mol_type = other DNA
tcctataactataacagtat

SEQ ID NO: 996 - DNA, 20 bp, synthetic construct
  source 1..20: mol_type = other DNA
ttcctataactataacagta

SEQ ID NO: 997 - DNA, 20 bp, synthetic construct
  source 1..20: mol_type = other DNA
gtttcctataactataacag

SEQ ID NO: 998 - DNA, 20 bp, synthetic construct
  source 1..20: mol_type = other DNA
actagtttcctataactata

SEQ ID NO: 999 - DNA, 20 bp, synthetic construct
  source 1..20: mol_type = other DNA
tactagtttcctataactat

SEQ ID NO: 1000 - DNA, 20 bp, synthetic construct
  source 1..20: mol_type = other DNA
caatatcactgtcctatatc

SEQ ID NO: 1001 - DNA, 20 bp, synthetic construct
  source 1..20: mol_type = other DNA
actataacaatatcactgtc

SEQ ID NO: 1002 - DNA, 20 bp, synthetic construct
  source 1..20: mol_type = other DNA
ttcctataactataacaata

SEQ ID NO: 1003 - DNA, 20 bp, synthetic construct
  source 1..20: mol_type = other DNA
tttcctataactataacaat

SEQ ID NO: 1004 - DNA, 20 bp, synthetic construct
  source 1..20: mol_type = other DNA
gtacctataactctaacagt

SEQ ID NO: 1005 - DNA, 20 bp, synthetic construct
  source 1..20: mol_type = other DNA
tcactgtacctataactcta

SEQ ID NO: 1006 - DNA, 20 bp, synthetic construct
  source 1..20: mol_type = other DNA
tatcactgtacctataactc

SEQ ID NO: 1007 - DNA, 20 bp, synthetic construct
  source 1..20: mol_type = other DNA
atatcactgtacctataact

SEQ ID NO: 1008 - DNA, 20 bp, synthetic construct
  source 1..20: mol_type = other DNA
acaatatcactgtacctata

SEQ ID NO: 1009 - DNA, 20 bp, synthetic construct
  source 1..20: mol_type = other DNA
aacaatatcactgtacctat

SEQ ID NO: 1010 - DNA, 20 bp, synthetic construct
  source 1..20: mol_type = other DNA
taacaatatcactgtaccta

SEQ ID NO: 1011 - DNA, 20 bp, synthetic construct
  source 1..20: mol_type = other DNA
tataacaatatcactgtacc

SEQ ID NO: 1012 - DNA, 20 bp, synthetic construct
  source 1..20: mol_type = other DNA
ctataacaatatcactgtac

SEQ ID NO: 1013 - DNA, 20 bp, synthetic construct
  source 1..20: mol_type = other DNA
tgtaacagtatcactgtact

SEQ ID NO: 1014 - DNA, 20 bp, synthetic construct
  source 1..20: mol_type = other DNA
ctgtaacagtatcactgtac

SEQ ID NO: 1015 - DNA, 20 bp, synthetic construct
  source 1..20: mol_type = other DNA
cctgtaacagtatcactgta

SEQ ID NO: 1016 - DNA, 20 bp, synthetic construct
  source 1..20: mol_type = other DNA
ctatatcactgtacctgtaa

SEQ ID NO: 1017 - DNA, 20 bp, synthetic construct
  source 1..20: mol_type = other DNA
cctatatcactgtacctgta

SEQ ID NO: 1018 - DNA, 20 bp, synthetic construct
  source 1..20: mol_type = other DNA
tcctatatcactgtacctgt

SEQ ID NO: 1019 - DNA, 20 bp, synthetic construct
  source 1..20: mol_type = other DNA
tgtcctatatcactgtacct

SEQ ID NO: 1020 - DNA, 20 bp, synthetic construct
  source 1..20: mol_type = other DNA
ctgtcctatatcactgtacc

SEQ ID NO: 1021 - DNA, 20 bp, synthetic construct
  source 1..20: mol_type = other DNA
actgtcctatatcactgtac

SEQ ID NO: 1022 - DNA, 20 bp, synthetic construct
  source 1..20: mol_type = other DNA
tcctataacagtatcactgt

SEQ ID NO: 1023 - DNA, 20 bp, synthetic construct
  source 1..20: mol_type = other DNA
ttcctataacagtatcactg

SEQ ID NO: 1024 - DNA, 20 bp, synthetic construct
  source 1..20: mol_type = other DNA
tactagtttcctataacagt

SEQ ID NO: 1025 - DNA, 20 bp, synthetic construct
  source 1..20: mol_type = other DNA
gtcactgtacctataactct

SEQ ID NO: 1026 - DNA, 20 bp, synthetic construct
  source 1..20: mol_type = other DNA
tgtcactgtacctataactc

SEQ ID NO: 1027 - DNA, 20 bp, synthetic construct
  source 1..20: mol_type = other DNA
atgtcactgtacctataact

SEQ ID NO: 1028 - DNA, 20 bp, synthetic construct
  source 1..20: mol_type = other DNA
tatgtcactgtacctataac

SEQ ID NO: 1029 - DNA, 20 bp, synthetic construct
  source 1..20: mol_type = other DNA
ctatgtcactgtacctataa

SEQ ID NO: 1030 - DNA, 20 bp, synthetic construct
  source 1..20: mol_type = other DNA
cctatgtcactgtacctata

SEQ ID NO: 1031 - DNA, 20 bp, synthetic construct
  source 1..20: mol_type = other DNA
tcctatgtcactgtacctat

SEQ ID NO: 1032 - DNA, 20 bp, synthetic construct
  source 1..20: mol_type = other DNA
gtcctatgtcactgtaccta

SEQ ID NO: 1033 - DNA, 20 bp, synthetic construct
  source 1..20: mol_type = other DNA
tgtcctatgtcactgtacct

SEQ ID NO: 1034 - DNA, 20 bp, synthetic construct
  source 1..20: mol_type = other DNA
ctgtcctatgtcactgtacc

SEQ ID NO: 1035 - DNA, 20 bp, synthetic construct
  source 1..20: mol_type = other DNA
actgtcctatgtcactgtac

SEQ ID NO: 1036 - DNA, 20 bp, synthetic construct
  source 1..20: mol_type = other DNA
cactgtcctatgtcactgta

SEQ ID NO: 1037 - DNA, 20 bp, synthetic construct
  source 1..20: mol_type = other DNA
tcactgtcctatgtcactgt

SEQ ID NO: 1038 - DNA, 20 bp, synthetic construct
  source 1..20: mol_type = other DNA
tatcactgtcctatgtcact

SEQ ID NO: 1039 - DNA, 20 bp, synthetic construct
  source 1..20: mol_type = other DNA
gtatcactgtcctatgtcac

SEQ ID NO: 1040 - DNA, 20 bp, synthetic construct
  source 1..20: mol_type = other DNA
agtatcactgtcctatgtca

SEQ ID NO: 1041 - DNA, 20 bp, synthetic construct
  source 1..20: mol_type = other DNA
aacagtatcactgtcctatg

SEQ ID NO: 1042 - DNA, 20 bp, synthetic construct
  source 1..20: mol_type = other DNA
ctacctataactctaacagt

SEQ ID NO: 1043 - DNA, 20 bp, synthetic construct
  source 1..20: mol_type = other DNA
actgtcctataactataaca

SEQ ID NO: 1044 - DNA, 20 bp, synthetic construct
  source 1..20: mol_type = other DNA
cactgtcctataactataac

SEQ ID NO: 1045 - DNA, 20 bp, synthetic construct
  source 1..20: mol_type = other DNA
cctatatcactgtacctata

SEQ ID NO: 1046 - DNA, 20 bp, synthetic construct
  source 1..20: mol_type = other DNA
tcctatatcactgtacctat

SEQ ID NO: 1047 - DNA, 20 bp, synthetic construct
  source 1..20: mol_type = other DNA
tacctataacagtatcactg

SEQ ID NO: 1048 - DNA, 20 bp, synthetic construct
  source 1..20: mol_type = other DNA
ataactataacagtatcacc

SEQ ID NO: 1049 - DNA, 20 bp, synthetic construct
  source 1..20: mol_type = other DNA
tcactgtacctataactata

SEQ ID NO: 1050 - DNA, 20 bp, synthetic construct
  source 1..20: mol_type = other DNA
aacaatatcactgtaccttt

SEQ ID NO: 1051 - DNA, 20 bp, synthetic construct
  source 1..20: mol_type = other DNA
taacaatatcactgtacctt

SEQ ID NO: 1052 - DNA, 20 bp, synthetic construct
  source 1..20: mol_type = other DNA
gtcctataactataacaata

SEQ ID NO: 1053 - DNA, 20 bp, synthetic construct
  source 1..20: mol_type = other DNA
cagtatcactgtcctatgtc

SEQ ID NO: 1054 - DNA, 20 bp, synthetic construct
  source 1..20: mol_type = other DNA
acagtatcactgtcctatgt

SEQ ID NO: 1055 - DNA, 20 bp, synthetic construct
  source 1..20: mol_type = other DNA
tctacctataactctaacag

SEQ ID NO: 1056 - DNA, 20 bp, synthetic construct
  source 1..20: mol_type = other DNA
ctctacctataactctaaca

SEQ ID NO: 1057 - DNA, 20 bp, synthetic construct
  source 1..20: mol_type = other DNA
actctacctataactctaac

SEQ ID NO: 1058 - DNA, 20 bp, synthetic construct
  source 1..20: mol_type = other DNA
actgtcctatatcactctac

SEQ ID NO: 1059 - DNA, 20 bp, synthetic construct
  source 1..20: mol_type = other DNA
cactgtcctatatcactcta

SEQ ID NO: 1060 - DNA, 20 bp, synthetic construct
  source 1..20: mol_type = other DNA
tcactgtcctatatcactct

SEQ ID NO: 1061 - DNA, 20 bp, synthetic construct
  source 1..20: mol_type = other DNA
atcactgtcctatatcactc

SEQ ID NO: 1062 - DNA, 20 bp, synthetic construct
  source 1..20: mol_type = other DNA
atcactgtactagttttcta

SEQ ID NO: 1063 - DNA, 20 bp, synthetic construct
  source 1..20: mol_type = other DNA
tatcactgtactagttttct

SEQ ID NO: 1064 - DNA, 20 bp, synthetic construct
  source 1..20: mol_type = other DNA
gtatcactgtactagttttc

SEQ ID NO: 1065 - DNA, 20 bp, synthetic construct
  source 1..20: mol_type = other DNA
agtatcactgtactagtttt

SEQ ID NO: 1066 - DNA, 20 bp, synthetic construct
  source 1..20: mol_type = other DNA
ataacagtatcactgtacta

SEQ ID NO: 1067 - DNA, 20 bp, synthetic construct
  source 1..20: mol_type = other DNA
gtcctataactataacagta

SEQ ID NO: 1068 - DNA, 20 bp, synthetic construct
  source 1..20: mol_type = other DNA
tgtcctataactataacagt

SEQ ID NO: 1069 - DNA, 20 bp, synthetic construct
  source 1..20: mol_type = other DNA
ctgtcctataactataacag

SEQ ID NO: 1070 - DNA, 20 bp, synthetic construct
  source 1..20: mol_type = other DNA
tcactgtcctataactataa

SEQ ID NO: 1071 - DNA, 20 bp, synthetic construct
  source 1..20: mol_type = other DNA
atcactgtcctataactata

SEQ ID NO: 1072 - DNA, 20 bp, synthetic construct
  source 1..20: mol_type = other DNA
tatcactgtcctataactat

SEQ ID NO: 1073 - DNA, 20 bp, synthetic construct
  source 1..20: mol_type = other DNA
atatcactgtcctataacta

SEQ ID NO: 1074 - DNA, 20 bp, synthetic construct
  source 1..20: mol_type = other DNA
ctatatcactgtacctataa

SEQ ID NO: 1075 - DNA, 20 bp, synthetic construct
  source 1..20: mol_type = other DNA
gtcctatatcactgtaccta

SEQ ID NO: 1076 - DNA, 20 bp, synthetic construct
  source 1..20: mol_type = other DNA
cctataacagtatcactgta

SEQ ID NO: 1077 - DNA, 20 bp, synthetic construct
  source 1..20: mol_type = other DNA
acctataacagtatcactgt

SEQ ID NO: 1078 - DNA, 20 bp, synthetic construct
  source 1..20: mol_type = other DNA
gtacctataacagtatcact

SEQ ID NO: 1079 - DNA, 20 bp, synthetic construct
  source 1..20: mol_type = other DNA
tgtacctataacagtatcac

SEQ ID NO: 1080 - DNA, 20 bp, synthetic construct
  source 1..20: mol_type = other DNA
tcactgtacctataacagta

SEQ ID NO: 1081 - DNA, 20 bp, synthetic construct
  source 1..20: mol_type = other DNA
atcactgtacctataacagt

SEQ ID NO: 1082 - DNA, 20 bp, synthetic construct
  source 1..20: mol_type = other DNA
tatcactgtacctataacag

SEQ ID NO: 1083 - DNA, 20 bp, synthetic construct
  source 1..20: mol_type = other DNA
aatatcactgtcctataact

SEQ ID NO: 1084 - DNA, 20 bp, synthetic construct
  source 1..20: mol_type = other DNA
caatatcactgtcctataac

SEQ ID NO: 1085 - DNA, 20 bp, synthetic construct
  source 1..20: mol_type = other DNA
acaatatcactgtcctataa

SEQ ID NO: 1086 - DNA, 20 bp, synthetic construct
  source 1..20: mol_type = other DNA
cgtactagtttcctataact

SEQ ID NO: 1087 - DNA, 20 bp, synthetic construct
  source 1..20: mol_type = other DNA
actataacagtatcaccgta

SEQ ID NO: 1088 - DNA, 20 bp, synthetic construct
  source 1..20: mol_type = other DNA
aactataacagtatcaccgt

SEQ ID NO: 1089 - DNA, 20 bp, synthetic construct
  source 1..20: mol_type = other DNA
taactataacagtatcaccg

SEQ ID NO: 1090 - DNA, 20 bp, synthetic construct
  source 1..20: mol_type = other DNA
acctataactataacagtat

SEQ ID NO: 1091 - DNA, 20 bp, synthetic construct
  source 1..20: mol_type = other DNA
tacctataactataacagta

SEQ ID NO: 1092 - DNA, 20 bp, synthetic construct
  source 1..20: mol_type = other DNA
gtacctataactataacagt

SEQ ID NO: 1093 - DNA, 20 bp, synthetic construct
  source 1..20: mol_type = other DNA
tgtacctataactataacag

SEQ ID NO: 1094 - DNA, 20 bp, synthetic construct
  source 1..20: mol_type = other DNA
atcactgtacctataactat

SEQ ID NO: 1095 - DNA, 20 bp, synthetic construct
  source 1..20: mol_type = other DNA
tatcactgtacctataacta

SEQ ID NO: 1096 - DNA, 20 bp, synthetic construct
  source 1..20: mol_type = other DNA
caactataacagtatcactg

SEQ ID NO: 1097 - DNA, 20 bp, synthetic construct
  source 1..20: mol_type = other DNA
acaactataacagtatcact

SEQ ID NO: 1098 - DNA, 20 bp, synthetic construct
  source 1..20: mol_type = other DNA
tacaactataacagtatcac

SEQ ID NO: 1099 - DNA, 20 bp, synthetic construct
  source 1..20: mol_type = other DNA
ctacaactataacagtatca

SEQ ID NO: 1100 - DNA, 20 bp, synthetic construct
  source 1..20: mol_type = other DNA
caatatcactgtcctacaac

SEQ ID NO: 1101 - DNA, 20 bp, synthetic construct
  source 1..20: mol_type = other DNA
gaatatcactgtcctataac

SEQ ID NO: 1102 - DNA, 20 bp, synthetic construct
  source 1..20: mol_type = other DNA
acaatatcactgtaccttta

SEQ ID NO: 1103 - DNA, 20 bp, synthetic construct
  source 1..20: mol_type = other DNA
tgtcctataactataacaat

SEQ ID NO: 1104 - DNA, 20 bp, synthetic construct
  source 1..20: mol_type = other DNA
ctgtcctataactataacaa

SEQ ID NO: 1105 - DNA, 20 bp, synthetic construct
  source 1..20: mol_type = other DNA
gcacctggcagaacagtacc

SEQ ID NO: 1106 - DNA, 20 bp, synthetic construct
  source 1..20: mol_type = other DNA
gacagtgggccagagccttg

SEQ ID NO: 1107 - DNA, 20 bp, synthetic construct
  source 1..20: mol_type = other DNA
acatcactgtcctataacta

SEQ ID NO: 1108 - DNA, 20 bp, synthetic construct
  source 1..20: mol_type = other DNA
gtacctatatcactgtaact

SEQ ID NO: 1109 - DNA, 20 bp, synthetic construct
  source 1..20: mol_type = other DNA
atatcactgtacctatatca

SEQ ID NO: 1110 - DNA, 20 bp, synthetic construct
  source 1..20: mol_type = other DNA
tcactgtcctataactatat

SEQ ID NO: 1111 - DNA, 20 bp, synthetic construct
  source 1..20: mol_type = other DNA
cgtcactgtacctataactg

SEQ ID NO: 1112 - DNA, 20 bp, synthetic construct
  source 1..20: mol_type = other DNA
atcactgtcctataactatt

SEQ ID NO: 1113 - DNA, 20 bp, synthetic construct
  source 1..20: mol_type = other DNA
aacatcactgtacctataac

SEQ ID NO: 1114 - DNA, 20 bp, synthetic construct
  source 1..20: mol_type = other DNA
gccatccagggtgctctccc

SEQ ID NO: 1115 - DNA, 20 bp, synthetic construct
  source 1..20: mol_type = other DNA
gcccccggagcaccttcact

SEQ ID NO: 1116 - DNA, 20 bp, synthetic construct
  source 1..20: mol_type = other DNA
cgtggttagcctgacatctc

SEQ ID NO: 1117 - DNA, 20 bp, synthetic construct
  source 1..20: mol_type = other DNA
gccatctggttagcctccga

SEQ ID NO: 1118 - DNA, 20 bp, synthetic construct
  source 1..20: mol_type = other DNA
tacactgaacccccttaggc

SEQ ID NO: 1119 - DNA, 20 bp, synthetic construct
  source 1..20: mol_type = other DNA
cagtttggcctttccatctc

SEQ ID NO: 1120 - DNA, 20 bp, synthetic construct
  source 1..20: mol_type = other DNA
gccactaacccacctcttaa

SEQ ID NO: 1121 - DNA, 20 bp, synthetic construct
  source 1..20: mol_type = other DNA
actcccatctactcccccat

SEQ ID NO: 1122 - DNA, 20 bp, synthetic construct
  source 1..20: mol_type = other DNA
ctgctgattgtgtctggctc

SEQ ID NO: 1123 - DNA, 20 bp, synthetic construct
  source 1..20: mol_type = other DNA
acaaggcttcgaggacagcc

SEQ ID NO: 1124 - DNA, 20 bp, synthetic construct
  source 1..20: mol_type = other DNA
gcgattccttgcctctgctg

SEQ ID NO: 1125 - DNA, 20 bp, synthetic construct
  source 1..20: mol_type = other DNA
caccgcgcgaatgcctgcct

SEQ ID NO: 1126 - DNA, 20 bp, synthetic construct
  source 1..20: mol_type = other DNA
atccaacctctctccctatc

SEQ ID NO: 1127 - DNA, 20 bp, synthetic construct
  source 1..20: mol_type = other DNA
gcccaagcctacatgcatac

SEQ ID NO: 1128 - DNA, 20 bp, synthetic construct
  source 1..20: mol_type = other DNA
ggcctggatacagcctttct

SEQ ID NO: 1129 - DNA, 20 bp, synthetic construct
  source 1..20: mol_type = other DNA
gtcccgaagagtcaagtcca

SEQ ID NO: 1130 - DNA, 20 bp, synthetic construct
  source 1..20: mol_type = other DNA
actgttgtccatagcagcat

SEQ ID NO: 1131 - DNA, 20 bp, synthetic construct
  source 1..20: mol_type = other DNA
agccctcaattgttgctggt

SEQ ID NO: 1132 - DNA, 20 bp, synthetic construct
  source 1..20: mol_type = other DNA
gatgacctgcagatgcacag

SEQ ID NO: 1133 - DNA, 20 bp, synthetic construct
  source 1..20: mol_type = other DNA
caggatagaactgatggtcc

SEQ ID NO: 1134 - DNA, 20 bp, synthetic construct
  source 1..20: mol_type = other DNA
agaacaggagacaatccact

SEQ ID NO: 1135 - DNA, 20 bp, synthetic construct
  source 1..20: mol_type = other DNA
gttcatgtggcaacctgtga

SEQ ID NO: 1136 - DNA, 20 bp, synthetic construct
  source 1..20: mol_type = other DNA
catcactgtcctataactat

SEQ ID NO: 1137 - DNA, 20 bp, synthetic construct
  source 1..20: mol_type = other DNA
tacctatatcactgtaacta

SEQ ID NO: 1138 - DNA, 20 bp, synthetic construct
  source 1..20: mol_type = other DNA
tgtacctatatcactgtaac

SEQ ID NO: 1139 - DNA, 20 bp, synthetic construct
  source 1..20: mol_type = other DNA
tatcactgtacctatatcac

SEQ ID NO: 1140 - DNA, 20 bp, synthetic construct
  source 1..20: mol_type = other DNA
aatatcactgtacctatatc

SEQ ID NO: 1141 - DNA, 20 bp, synthetic construct
  source 1..20: mol_type = other DNA
caatatcactgtacctatat

SEQ ID NO: 1142 - DNA, 20 bp, synthetic construct
  source 1..20: mol_type = other DNA
actatatcactgtcctataa

SEQ ID NO: 1143 - DNA, 20 bp, synthetic construct
  source 1..20: mol_type = other DNA
taactatatcactgtcctat

SEQ ID NO: 1144 - DNA, 20 bp, synthetic construct
  source 1..20: mol_type = other DNA
ataactatatcactgtccta

SEQ ID NO: 1145 - DNA, 20 bp, synthetic construct
  source 1..20: mol_type = other DNA
ctgtcctataactatatcac

SEQ ID NO: 1146 - DNA, 20 bp, synthetic construct
  source 1..20: mol_type = other DNA
actgtcctataactatatca

SEQ ID NO: 1147 - DNA, 20 bp, synthetic construct
  source 1..20: mol_type = other DNA
cactgtcctataactatatc

SEQ ID NO: 1148 - DNA, 20 bp, synthetic construct
  source 1..20: mol_type = other DNA
gtaacaatatcactgtccta

SEQ ID NO: 1149 - DNA, 20 bp, synthetic construct
  source 1..20: mol_type = other DNA
ctgtaacaatatcactgtcc

SEQ ID NO: 1150 - DNA, 20 bp, synthetic construct
  source 1..20: mol_type = other DNA
actgtaacaatatcactgtc

SEQ ID NO: 1151 - DNA, 20 bp, synthetic construct
  source 1..20: mol_type = other DNA
cactgtacctataactgtaa

SEQ ID NO: 1152 - DNA, 20 bp, synthetic construct
  source 1..20: mol_type = other DNA
tcactgtacctataactgta

SEQ ID NO: 1153 - DNA, 20 bp, synthetic construct
  source 1..20: mol_type = other DNA
gtcactgtacctataactgt

SEQ ID NO: 1154 - DNA, 20 bp, synthetic construct
  source 1..20: mol_type = other DNA
actgtcctataactattaca

SEQ ID NO: 1155 - DNA, 20 bp, synthetic construct
  source 1..20: mol_type = other DNA
cactgtcctataactattac

SEQ ID NO: 1156 - DNA, 20 bp, synthetic construct
  source 1..20: mol_type = other DNA
tcactgtcctataactatta

SEQ ID NO: 1157 - DNA, 20 bp, synthetic construct
  source 1..20: mol_type = other DNA
acctataactataacaatat

SEQ ID NO: 1158 - DNA, 20 bp, synthetic construct
  source 1..20: mol_type = other DNA
tacctataactataacaata

SEQ ID NO: 1159 - DNA, 20 bp, synthetic construct
  source 1..20: mol_type = other DNA
gtacctataactataacaat

SEQ ID NO: 1160 - DNA, 20 bp, synthetic construct
  source 1..20: mol_type = other DNA
catcactgtacctataacta

SEQ ID NO: 1161 - DNA, 20 bp, synthetic construct
  source 1..20: mol_type = other DNA
acatcactgtacctataact

SEQ ID NO: 1162 - DNA, 20 bp, synthetic construct
  source 1..20: mol_type = other DNA
caacatcactgtacctataa

SEQ ID NO: 1163 - DNA, 20 bp, synthetic construct
  source 1..20: mol_type = other DNA
acatcttgtcattaacatcc

SEQ ID NO: 1164 - DNA, 20 bp, synthetic construct
  source 1..20: mol_type = other DNA
gcacccaatacagggccagg

SEQ ID NO: 1165 - DNA, 20 bp, synthetic construct
  source 1..20: mol_type = other DNA
tgcctcctggcagccttcaa

SEQ ID NO: 1166 - DNA, 20 bp, synthetic construct
  source 1..20: mol_type = other DNA
tgaaaagccacgcccttagc

SEQ ID NO: 1167 - DNA, 20 bp, synthetic construct
  source 1..20: mol_type = other DNA
gccaggagacagccctactc

SEQ ID NO: 1168 - DNA, 20 bp, synthetic construct
  source 1..20: mol_type = other DNA
agcccaatgtcctaacctgt

SEQ ID NO: 1169 - DNA, 20 bp, synthetic construct
  source 1..20: mol_type = other DNA
tgcggttatatgggctgaag

SEQ ID NO: 1170 - DNA, 20 bp, synthetic construct
  source 1..20: mol_type = other DNA
cctttagccactcctcttgc

SEQ ID NO: 1171 - DNA, 20 bp, synthetic construct
  source 1..20: mol_type = other DNA
ccccatggtaccaaagccat

SEQ ID NO: 1172 - DNA, 20 bp, synthetic construct
  source 1..20: mol_type = other DNA
ctcaatgccaccctttcccc

SEQ ID NO: 1173 - DNA, 20 bp, synthetic construct
  source 1..20: mol_type = other DNA
ctgtctaactggcctggctg

SEQ ID NO: 1174 - DNA, 20 bp, synthetic construct
  source 1..20: mol_type = other DNA
ggtcagaaggcctcttattc

SEQ ID NO: 1175 - DNA, 20 bp, synthetic construct
  source 1..20: mol_type = other DNA
ccatctgtcccctcaatccc

SEQ ID NO: 1176 - DNA, 20 bp, synthetic construct
  source 1..20: mol_type = other DNA
actctggcactggtcatgga

SEQ ID NO: 1177 - DNA, 20 bp, synthetic construct
  source 1..20: mol_type = other DNA
ataaagtgcgattaagcccc

SEQ ID NO: 1178 - DNA, 20 bp, synthetic construct
  source 1..20: mol_type = other DNA
taccaagcttgtagaaggga

SEQ ID NO: 1179 - DNA, 20 bp, synthetic construct
  source 1..20: mol_type = other DNA
gaaagacggccaatgggaaa

SEQ ID NO: 1180 - DNA, 20 bp, synthetic construct
  source 1..20: mol_type = other DNA
ctctatcaaaatcctgctgc

SEQ ID NO: 1181 - DNA, 20 bp, synthetic construct
  source 1..20: mol_type = other DNA
ctccagtcaccaccattgcc

SEQ ID NO: 1182 - DNA, 20 bp, synthetic construct
  source 1..20: mol_type = other DNA
aagagtaagccttcacaggg

SEQ ID NO: 1183 - DNA, 20 bp, synthetic construct
  source 1..20: mol_type = other DNA
ctcaccagagttgtccccag

SEQ ID NO: 1184 - DNA, 20 bp, synthetic construct
  source 1..20: mol_type = other DNA
gcagctcacacccaaaaagc

SEQ ID NO: 1185 - DNA, 20 bp, synthetic construct
  source 1..20: mol_type = other DNA
tctgttaccttgaggattgt

SEQ ID NO: 1186 - DNA, 20 bp, synthetic construct
  source 1..20: mol_type = other DNA
cgccatctgccctgtacaga

SEQ ID NO: 1187 - DNA, 20 bp, synthetic construct
  source 1..20: mol_type = other DNA
ttggtggtgggattggtggt

SEQ ID NO: 1188 - DNA, 20 bp, synthetic construct
  source 1..20: mol_type = other DNA
aattggtggtgggattggtg

SEQ ID NO: 1189 - DNA, 20 bp, synthetic construct
  source 1..20: mol_type = other DNA
gaattggtggtgggattggt

SEQ ID NO: 1190 - DNA, 20 bp, synthetic construct
  source 1..20: mol_type = other DNA
ggcaggattggtggtggaat

SEQ ID NO: 1191 - DNA, 20 bp, synthetic construct
  source 1..20: mol_type = other DNA
tgagattggtggtgggtggc

SEQ ID NO: 1192 - DNA, 20 bp, synthetic construct
  source 1..20: mol_type = other DNA
ggtggtgggattggtgctga

SEQ ID NO: 1193 - DNA, 20 bp, synthetic construct
  source 1..20: mol_type = other DNA
gtaggtggtgggattggtgg

SEQ ID NO: 1194 - DNA, 20 bp, synthetic construct
  source 1..20: mol_type = other DNA
ggtaggtggtgggattggtg

SEQ ID NO: 1195 - DNA, 20 bp, synthetic construct
  source 1..20: mol_type = other DNA
ggtggcgggattggtggtgg

SEQ ID NO: 1196 - DNA, 20 bp, synthetic construct
  source 1..20: mol_type = other DNA
gatcggtggtgggattggtc

SEQ ID NO: 1197 - DNA, 20 bp, synthetic construct
  source 1..20: mol_type = other DNA
ggatcggtggtgggattggt

SEQ ID NO: 1198 - DNA, 20 bp, synthetic construct
  source 1..20: mol_type = other DNA
ttggtggcgggatcggtggt

SEQ ID NO: 1199 - DNA, 20 bp, synthetic construct
  source 1..20: mol_type = other DNA
attggtggcgggatcggtgg

SEQ ID NO: 1200 - DNA, 20 bp, synthetic construct
  source 1..20: mol_type = other DNA
gattggtggcgggatcggtg

SEQ ID NO: 1201 - DNA, 20 bp, synthetic construct
  source 1..20: mol_type = other DNA
ggattggtggcgggatcggt

SEQ ID NO: 1202 - DNA, 20 bp, synthetic construct
  source 1..20: mol_type = other DNA
tggtggtgggattggtggtt

SEQ ID NO: 1203 - DNA, 20 bp, synthetic construct
  source 1..20: mol_type = other DNA
tcttctagggccacacctct

SEQ ID NO: 1204 - DNA, 20 bp, synthetic construct
  source 1..20: mol_type = other DNA
tggtcccaaattggagtgca

SEQ ID NO: 1205 - DNA, 20 bp, synthetic construct
  source 1..20: mol_type = other DNA
tctctatacagctgggcaca

SEQ ID NO: 1206 - DNA, 20 bp, synthetic construct
  source 1..20: mol_type = other DNA
cacttcccagcaaccctcac

SEQ ID NO: 1207 - DNA, 20 bp, synthetic construct
  source 1..20: mol_type = other DNA
gctcctggcagcaatgaccc

SEQ ID NO: 1208 - DNA, 20 bp, synthetic construct
  source 1..20: mol_type = other DNA
gggtatcttcactgttccag

SEQ ID NO: 1209 - DNA, 20 bp, synthetic construct
  source 1..20: mol_type = other DNA
cgtcatgcttacctttctcc

SEQ ID NO: 1210 - DNA, 20 bp, synthetic construct
  source 1..20: mol_type = other DNA
gccctccgagctttggcaac

SEQ ID NO: 1211 - DNA, 20 bp, synthetic construct
  source 1..20: mol_type = other DNA
gcagccccccagaaatccca

SEQ ID NO: 1212 - DNA, 20 bp, synthetic construct
  source 1..20: mol_type = other DNA
tctcaagcagcctattgtgt

SEQ ID NO: 1213 - DNA, 20 bp, synthetic construct
  source 1..20: mol_type = other DNA
gtgcaagaccttgcttgcca

SEQ ID NO: 1214 - DNA, 20 bp, synthetic construct
  source 1..20: mol_type = other DNA
ctgtagtccactacacagca

SEQ ID NO: 1215 - DNA, 20 bp, synthetic construct
  source 1..20: mol_type = other DNA
tctccctgagtcacagtgga

SEQ ID NO: 1216 - DNA, 20 bp, synthetic construct
  source 1..20: mol_type = other DNA
ccaggtgcagcacggagagg

SEQ ID NO: 1217 - DNA, 20 bp, synthetic construct
  source 1..20: mol_type = other DNA
tagaatggcagggttctgtg

SEQ ID NO: 1218 - DNA, 20 bp, synthetic construct
  source 1..20: mol_type = other DNA
gatgcatccaacacttaccc

SEQ ID NO: 1219 - DNA, 20 bp, synthetic construct
  source 1..20: mol_type = other DNA
attggtggtgggattggtgg

SEQ ID NO: 1220 - DNA, 20 bp, synthetic construct
  source 1..20: mol_type = other DNA
gcaggattggtggtggaatt

SEQ ID NO: 1221 - DNA, 20 bp, synthetic construct
  source 1..20: mol_type = other DNA
tggcaggattggtggtggaa

SEQ ID NO: 1222 - DNA, 20 bp, synthetic construct
  source 1..20: mol_type = other DNA
gagattggtggtgggtggca

SEQ ID NO: 1223 - DNA, 20 bp, synthetic construct
  source 1..20: mol_type = other DNA
gtgagattggtggtgggtgg

SEQ ID NO: 1224 - DNA, 20 bp, synthetic construct
  source 1..20: mol_type = other DNA
gattggtggtgggattggtg

SEQ ID NO: 1225 - DNA, 20 bp, synthetic construct
  source 1..20: mol_type = other DNA
ggattggtggtgggattggt

SEQ ID NO: 1226 - DNA, 20 bp, synthetic construct
  source 1..20: mol_type = other DNA
aggattggtggtgggattgg

SEQ ID NO: 1227 - DNA, 20 bp, synthetic construct
  source 1..20: mol_type = other DNA
taggattggtggtgggattg

SEQ ID NO: 1228 - DNA, 20 bp, synthetic construct
  source 1..20: mol_type = other DNA
gtaggattggtggtgggatt

SEQ ID NO: 1229 - DNA, 20 bp, synthetic construct
  source 1..20: mol_type = other DNA
ggtaggattggtggtgggat

SEQ ID NO: 1230 - DNA, 20 bp, synthetic construct
  source 1..20: mol_type = other DNA
tggtaggattggtggtggga

SEQ ID NO: 1231 - DNA, 20 bp, synthetic construct
  source 1..20: mol_type = other DNA
tggtggtgggattggtgctg

SEQ ID NO: 1232 - DNA, 20 bp, synthetic construct
  source 1..20: mol_type = other DNA
ttggtggtgggattggtgct

SEQ ID NO: 1233 - DNA, 20 bp, synthetic construct
  source 1..20: mol_type = other DNA
attggtggtgggattggtgc

SEQ ID NO: 1234 - DNA, 20 bp, synthetic construct
  source 1..20: mol_type = other DNA
aggtggtgggattggtggtg

SEQ ID NO: 1235 - DNA, 20 bp, synthetic construct
  source 1..20: mol_type = other DNA
taggtggtgggattggtggt

SEQ ID NO: 1236 - DNA, 20 bp, synthetic construct
  source 1..20: mol_type = other DNA
atcggtggtgggattggtcg

SEQ ID NO: 1237 - DNA, 20 bp, synthetic construct
  source 1..20: mol_type = other DNA
ggtggtgggattggtggcgg

SEQ ID NO: 1238 - DNA, 20 bp, synthetic construct
  source 1..20: mol_type = other DNA
tggtggtgggattggtggcg

SEQ ID NO: 1239 - DNA, 20 bp, synthetic construct
  source 1..20: mol_type = other DNA
ttggtggtgggattggtggc

SEQ ID NO: 1240 - DNA, 20 bp, synthetic construct
  source 1..20: mol_type = other DNA
gttggtggcgggatcggtgg

SEQ ID NO: 1241 - DNA, 20 bp, synthetic construct
  source 1..20: mol_type = other DNA
ggttggtggcgggatcggtg

SEQ ID NO: 1242 - DNA, 20 bp, synthetic construct
  source 1..20: mol_type = other DNA
tggttggtggcgggatcggt

SEQ ID NO: 1243 - DNA, 20 bp, synthetic construct
  source 1..20: mol_type = other DNA
gtggttggtggcgggatcgg

SEQ ID NO: 1244 - DNA, 20 bp, synthetic construct
  source 1..20: mol_type = other DNA
gggattggtggttggtggcg

SEQ ID NO: 1245 - DNA, 20 bp, synthetic construct
  source 1..20: mol_type = other DNA
gggtcttgctccacccacat

SEQ ID NO: 1246 - DNA, 20 bp, synthetic construct
  source 1..20: mol_type = other DNA
ccaagtagtgcaaggcatgt

SEQ ID NO: 1247 - DNA, 20 bp, synthetic construct
  source 1..20: mol_type = other DNA
atcatgcttactgcaagtga

SEQ ID NO: 1248 - DNA, 20 bp, synthetic construct
  source 1..20: mol_type = other DNA
tgaaactgggcagtccttcc

SEQ ID NO: 1249 - DNA, 20 bp, synthetic construct
  source 1..20: mol_type = other DNA
ccaccttcttacatatgcta

SEQ ID NO: 1250 - DNA, 20 bp, synthetic construct
  source 1..20: mol_type = other DNA
gcctctcagacggcacagac

SEQ ID NO: 1251 - DNA, 20 bp, synthetic construct
  source 1..20: mol_type = other DNA
ttgccctcacacattcgaat

SEQ ID NO: 1252 - DNA, 20 bp, synthetic construct
  source 1..20: mol_type = other DNA
tgctttctgcccaacctcta

SEQ ID NO: 1253 - DNA, 20 bp, synthetic construct
  source 1..20: mol_type = other DNA
ctgtgctcccggccattagc

SEQ ID NO: 1254 - DNA, 20 bp, synthetic construct
  source 1..20: mol_type = other DNA
gagacagtttggcaagctac

SEQ ID NO: 1255 - DNA, 20 bp, synthetic construct
  source 1..20: mol_type = other DNA
ggagagagacggcaccctgt

SEQ ID NO: 1256 - DNA, 20 bp, synthetic construct
  source 1..20: mol_type = other DNA
tcacctgtgagtaaccaata

SEQ ID NO: 1257 - DNA, 20 bp, synthetic construct
  source 1..20: mol_type = other DNA
cccctcttaaatagcacatg

SEQ ID NO: 1258 - DNA, 20 bp, synthetic construct
  source 1..20: mol_type = other DNA
ccaagtatctcatgtgcctg

SEQ ID NO: 1259 - DNA, 16 bp, synthetic construct
  source 1..16: mol_type = other DNA
ctagtttcctataact

SEQ ID NO: 1260 - DNA, 16 bp, synthetic construct
  source 1..16: mol_type = other DNA
actagtttcctataac

SEQ ID NO: 1261 - DNA, 16 bp, synthetic construct
  source 1..16: mol_type = other DNA
tactagtttcctataa

SEQ ID NO: 1262 - DNA, 16 bp, synthetic construct
  source 1..16: mol_type = other DNA
gtactagtttcctata

SEQ ID NO: 1263 - DNA, 16 bp, synthetic construct
  source 1..16: mol_type = other DNA
tgtactagtttcctat

SEQ ID NO: 1264 - DNA, 16 bp, synthetic construct
  source 1..16: mol_type = other DNA
ctgtactagtttccta

SEQ ID NO: 1265 - DNA, 16 bp, synthetic construct
  source 1..16: mol_type = other DNA
actgtactagtttcct

SEQ ID NO: 1266 - DNA, 16 bp, synthetic construct
  source 1..16: mol_type = other DNA
cactgtactagtttcc

SEQ ID NO: 1267 - DNA, 16 bp, synthetic construct
  source 1..16: mol_type = other DNA
tcactgtactagtttc

SEQ ID NO: 1268 - DNA, 16 bp, synthetic construct
  source 1..16: mol_type = other DNA
atcactgtactagttt

SEQ ID NO: 1269 - DNA, 16 bp, synthetic construct
  source 1..16: mol_type = other DNA
tatcactgtactagtt

SEQ ID NO: 1270 - DNA, 17 bp, synthetic construct
  source 1..17: mol_type = other DNA
actagtttcctataact

SEQ ID NO: 1271 - DNA, 17 bp, synthetic construct
  source 1..17: mol_type = other DNA
tactagtttcctataac

SEQ ID NO: 1272 - DNA, 17 bp, synthetic construct
  source 1..17: mol_type = other DNA
gtactagtttcctataa

SEQ ID NO: 1273 - DNA, 17 bp, synthetic construct
  source 1..17: mol_type = other DNA
tgtactagtttcctata

SEQ ID NO: 1274 - DNA, 17 bp, synthetic construct
  source 1..17: mol_type = other DNA
ctgtactagtttcctat

SEQ ID NO: 1275 - DNA, 17 bp, synthetic construct
  source 1..17: mol_type = other DNA
actgtactagtttccta

SEQ ID NO: 1276 - DNA, 17 bp, synthetic construct
  source 1..17: mol_type = other DNA
cactgtactagtttcct

SEQ ID NO: 1277 - DNA, 17 bp, synthetic construct
  source 1..17: mol_type = other DNA
tcactgtactagtttcc

SEQ ID NO: 1278 - DNA, 17 bp, synthetic construct
  source 1..17: mol_type = other DNA
atcactgtactagtttc

SEQ ID NO: 1279 - DNA, 17 bp, synthetic construct
  source 1..17: mol_type = other DNA
tatcactgtactagttt

SEQ ID NO: 1280 - DNA, 18 bp, synthetic construct
  source 1..18: mol_type = other DNA
tactagtttcctataact

SEQ ID NO: 1281 - DNA, 18 bp, synthetic construct
  source 1..18: mol_type = other DNA
gtactagtttcctataac

SEQ ID NO: 1282 - DNA, 18 bp, synthetic construct
  source 1..18: mol_type = other DNA
tgtactagtttcctataa

SEQ ID NO: 1283 - DNA, 18 bp, synthetic construct
  source 1..18: mol_type = other DNA
ctgtactagtttcctata

SEQ ID NO: 1284 - DNA, 18 bp, synthetic construct
  source 1..18: mol_type = other DNA
actgtactagtttcctat

SEQ ID NO: 1285 - DNA, 18 bp, synthetic construct
  source 1..18: mol_type = other DNA
cactgtactagtttccta

SEQ ID NO: 1286 - DNA, 18 bp, synthetic construct
  source 1..18: mol_type = other DNA
tcactgtactagtttcct

SEQ ID NO: 1287 - DNA, 18 bp, synthetic construct
  source 1..18: mol_type = other DNA
atcactgtactagtttcc

SEQ ID NO: 1288 - DNA, 18 bp, synthetic construct
  source 1..18: mol_type = other DNA
tatcactgtactagtttc

SEQ ID NO: 1289 - DNA, 17 bp, synthetic construct
  source 1..17: mol_type = other DNA
gtatcactgtactagtt

SEQ ID NO: 1290 - DNA, 17 bp, synthetic construct
  source 1..17: mol_type = other DNA
agtatcactgtactagt

SEQ ID NO: 1291 - DNA, 17 bp, synthetic construct
  source 1..17: mol_type = other DNA
cagtatcactgtactag

SEQ ID NO: 1292 - DNA, 17 bp, synthetic construct
  source 1..17: mol_type = other DNA
aacagtatcactgtact

SEQ ID NO: 1293 - DNA, 17 bp, synthetic construct
  source 1..17: mol_type = other DNA
taacagtatcactgtac

SEQ ID NO: 1294 - DNA, 17 bp, synthetic construct
  source 1..17: mol_type = other DNA
ctaacagtatcactgta

SEQ ID NO: 1295 - DNA, 17 bp, synthetic construct
  source 1..17: mol_type = other DNA
tctaacagtatcactgt

SEQ ID NO: 1296 - DNA, 17 bp, synthetic construct
  source 1..17: mol_type = other DNA
ctctaacagtatcactg

SEQ ID NO: 1297 - DNA, 17 bp, synthetic construct
  source 1..17: mol_type = other DNA
tatcactgtcctataac

SEQ ID NO: 1298 - DNA, 17 bp, synthetic construct
  source 1..17: mol_type = other DNA
atatcactgtcctataa

SEQ ID NO: 1299 - DNA, 17 bp, synthetic construct
  source 1..17: mol_type = other DNA
tatatcactgtcctata

SEQ ID NO: 1300 - DNA, 17 bp, synthetic construct
  source 1..17: mol_type = other DNA
tatcactgtcctatatc

SEQ ID NO: 1301 - DNA, 17 bp, synthetic construct
  source 1..17: mol_type = other DNA
gtatcactgtcctatat

SEQ ID NO: 1302 - DNA, 17 bp, synthetic construct
  source 1..17: mol_type = other DNA
agtatcactgtcctata

SEQ ID NO: 1303 - DNA, 17 bp, synthetic construct
  source 1..17: mol_type = other DNA
taacagtatcactgtcc

SEQ ID NO: 1304 - DNA, 17 bp, synthetic construct
  source 1..17: mol_type = other DNA
ataacagtatcactgtc

SEQ ID NO: 1305 - DNA, 17 bp, synthetic construct
  source 1..17: mol_type = other DNA
tataacagtatcactgt

SEQ ID NO: 1306 - DNA, 17 bp, synthetic construct
  source 1..17: mol_type = other DNA
ctataacagtatcactg

SEQ ID NO: 1307 - DNA, 17 bp, synthetic construct
  source 1..17: mol_type = other DNA
cctataactataacagt

SEQ ID NO: 1308 - DNA, 17 bp, synthetic construct
  source 1..17: mol_type = other DNA
tcctataactataacag

SEQ ID NO: 1309 - DNA, 17 bp, synthetic construct
  source 1..17: mol_type = other DNA
cctataactataacaat

SEQ ID NO: 1310 - DNA, 17 bp, synthetic construct
  source 1..17: mol_type = other DNA
gtaacagtatcactgta

SEQ ID NO: 1311 - DNA, 17 bp, synthetic construct
  source 1..17: mol_type = other DNA
ataacagtatcactgta

SEQ ID NO: 1312 - DNA, 17 bp, synthetic construct
  source 1..17: mol_type = other DNA
gtcctataactataaca

SEQ ID NO: 1313 - DNA, 17 bp, synthetic construct
  source 1..17: mol_type = other DNA
tgtcctataactataac

SEQ ID NO: 1314 - DNA, 17 bp, synthetic construct
  source 1..17: mol_type = other DNA
acctataactataacag

SEQ ID NO: 1315 - DNA, 17 bp, synthetic construct
  source 1..17: mol_type = other DNA
tacctataactataaca

SEQ ID NO: 1316 - DNA, 17 bp, synthetic construct
  source 1..17: mol_type = other DNA
acctataactataacaa

SEQ ID NO: 1317 - DNA, 16 bp, synthetic construct
  source 1..16: mol_type = other DNA
cctttctccttcgaga

SEQ ID NO: 1318 - DNA, 16 bp, synthetic construct
  source 1..16: mol_type = other DNA
acctttctccttcgag

SEQ ID NO: 1319 - DNA, 16 bp, synthetic construct
  source 1..16: mol_type = other DNA
cacctttctccttcga

SEQ ID NO: 1320 - DNA, 16 bp, synthetic construct
  source 1..16: mol_type = other DNA
atttgttaccaaagga

SEQ ID NO: 1321 - DNA, 16 bp, synthetic construct
  source 1..16: mol_type = other DNA
tcttcatttgttacca

SEQ ID NO: 1322 - DNA, 16 bp, synthetic construct
  source 1..16: mol_type = other DNA
ccttctttatagccag

SEQ ID NO: 1323 - DNA, 16 bp, synthetic construct
  source 1..16: mol_type = other DNA
cccttctttatagcca

SEQ ID NO: 1324 - DNA, 16 bp, synthetic construct
  source 1..16: mol_type = other DNA
ccccttctttatagcc

SEQ ID NO: 1325 - DNA, 16 bp, synthetic construct
  source 1..16: mol_type = other DNA
aagcatcttttccccc

SEQ ID NO: 1326 - DNA, 16 bp, synthetic construct
  source 1..16: mol_type = other DNA
agggaccacctgaatc

SEQ ID NO: 1327 - DNA, 16 bp, synthetic construct
  source 1..16: mol_type = other DNA
aagggaccacctgaat

SEQ ID NO: 1328 - DNA, 16 bp, synthetic construct
  source 1..16: mol_type = other DNA
taagggaccacctgaa

SEQ ID NO: 1329 - DNA, 16 bp, synthetic construct
  source 1..16: mol_type = other DNA
ctaagggaccacctga

SEQ ID NO: 1330 - DNA, 16 bp, synthetic construct
  source 1..16: mol_type = other DNA
actaagggaccacctg

SEQ ID NO: 1331 - DNA, 16 bp, synthetic construct
  source 1..16: mol_type = other DNA
aactaagggaccacct

SEQ ID NO: 1332 - DNA, 16 bp, synthetic construct
  source 1..16: mol_type = other DNA
aaactaagggaccacc

SEQ ID NO: 1333 - DNA, 16 bp, synthetic construct
  source 1..16: mol_type = other DNA
caaactaagggaccac

SEQ ID NO: 1334 - DNA, 16 bp, synthetic construct
  source 1..16: mol_type = other DNA
tgcaaactaagggacc

SEQ ID NO: 1335 - DNA, 16 bp, synthetic construct
  source 1..16: mol_type = other DNA
ttgcaaactaagggac

SEQ ID NO: 1336 - DNA, 16 bp, synthetic construct
  source 1..16: mol_type = other DNA
tttgcaaactaaggga

SEQ ID NO: 1337 - DNA, 16 bp, synthetic construct
  source 1..16: mol_type = other DNA
gtttgcaaactaaggg

SEQ ID NO: 1338 - DNA, 16 bp, synthetic construct
  source 1..16: mol_type = other DNA
tgtttgcaaactaagg

SEQ ID NO: 1339 - DNA, 16 bp, synthetic construct
  source 1..16: mol_type = other DNA
gtgtttgcaaactaag

SEQ ID NO: 1340 - DNA, 16 bp, synthetic construct
  source 1..16: mol_type = other DNA
tgctccctgcgggcac

SEQ ID NO: 1341 - DNA, 16 bp, synthetic construct
  source 1..16: mol_type = other DNA
agacaccaggttgctc

SEQ ID NO: 1342 - DNA, 16 bp, synthetic construct
  source 1..16: mol_type = other DNA
ctcagcgactttggtg

SEQ ID NO: 1343 - DNA, 16 bp, synthetic construct
  source 1..16: mol_type = other DNA
actcagcgactttggt

SEQ ID NO: 1344 - DNA, 16 bp, synthetic construct
  source 1..16: mol_type = other DNA
tactcagcgactttgg

SEQ ID NO: 1345 - DNA, 16 bp, synthetic construct
  source 1..16: mol_type = other DNA
gtactcagcgactttg

SEQ ID NO: 1346 - DNA, 16 bp, synthetic construct
  source 1..16: mol_type = other DNA
tgtactcagcgacttt

SEQ ID NO: 1347 - DNA, 16 bp, synthetic construct
  source 1..16: mol_type = other DNA
atgtactcagcgactt

SEQ ID NO: 1348 - DNA, 16 bp, synthetic construct
  source 1..16: mol_type = other DNA
catgtactcagcgact

SEQ ID NO: 1349 - DNA, 16 bp, synthetic construct
  source 1..16: mol_type = other DNA
ccatgtactcagcgac

SEQ ID NO: 1350 - DNA, 16 bp, synthetic construct
  source 1..16: mol_type = other DNA
tccatgtactcagcga

SEQ ID NO: 1351 - DNA, 16 bp, synthetic construct
  source 1..16: mol_type = other DNA
gagcttttccatcact

SEQ ID NO: 1352 - DNA, 16 bp, synthetic construct
  source 1..16: mol_type = other DNA
gcatctgagcttttcc

SEQ ID NO: 1353 - DNA, 16 bp, synthetic construct
  source 1..16: mol_type = other DNA
tgcatctgagcttttc

SEQ ID NO: 1354 - DNA, 16 bp, synthetic construct
  source 1..16: mol_type = other DNA
gactgcatctgagctt

SEQ ID NO: 1355 - DNA, 16 bp, synthetic construct
  source 1..16: mol_type = other DNA
gtgactgcatctgagc

SEQ ID NO: 1356 - DNA, 16 bp, synthetic construct
  source 1..16: mol_type = other DNA
ggtgactgcatctgag

SEQ ID NO: 1357 - DNA, 16 bp, synthetic construct
  source 1..16: mol_type = other DNA
tggtgactgcatctga

SEQ ID NO: 1358 - DNA, 16 bp, synthetic construct
  source 1..16: mol_type = other DNA
catgctggtgactgca

SEQ ID NO: 1359 - DNA, 16 bp, synthetic construct
  source 1..16: mol_type = other DNA
tcatgctggtgactgc

SEQ ID NO: 1360 - DNA, 16 bp, synthetic construct
  source 1..16: mol_type = other DNA
ctcatgctggtgactg

SEQ ID NO: 1361 - DNA, 16 bp, synthetic construct
  source 1..16: mol_type = other DNA
tctcatgctggtgact

SEQ ID NO: 1362 - DNA, 16 bp, synthetic construct
  source 1..16: mol_type = other DNA
tggactgcttctcatg

SEQ ID NO: 1363 - DNA, 16 bp, synthetic construct
  source 1..16: mol_type = other DNA
tctggactgcttctca

SEQ ID NO: 1364 - DNA, 16 bp, synthetic construct
  source 1..16: mol_type = other DNA
ctctggactgcttctc

SEQ ID NO: 1365 - DNA, 16 bp, synthetic construct
  source 1..16: mol_type = other DNA
agactctggactgctt

SEQ ID NO: 1366 - DNA, 16 bp, synthetic construct
  source 1..16: mol_type = other DNA
tagactctggactgct

SEQ ID NO: 1367 - DNA, 16 bp, synthetic construct
  source 1..16: mol_type = other DNA
ctagactctggactgc

SEQ ID NO: 1368 - DNA, 16 bp, synthetic construct
  source 1..16: mol_type = other DNA
tgcctagactctggac

SEQ ID NO: 1369 - DNA, 16 bp, synthetic construct
  source 1..16: mol_type = other DNA
ttgcctagactctgga

SEQ ID NO: 1370 - DNA, 16 bp, synthetic construct
  source 1..16: mol_type = other DNA
attgcctagactctgg

SEQ ID NO: 1371 - DNA, 16 bp, synthetic construct
  source 1..16: mol_type = other DNA
tttgacttgaactcag

SEQ ID NO: 1372 - DNA, 16 bp, synthetic construct
  source 1..16: mol_type = other DNA
atttgacttgaactca

SEQ ID NO: 1373 - DNA, 16 bp, synthetic construct
  source 1..16: mol_type = other DNA
aatttgacttgaactc

SEQ ID NO: 1374 - DNA, 16 bp, synthetic construct
  source 1..16: mol_type = other DNA
gaatttgacttgaact

SEQ ID NO: 1375 - DNA, 16 bp, synthetic construct
  source 1..16: mol_type = other DNA
agaatttgacttgaac

SEQ ID NO: 1376 - DNA, 16 bp, synthetic construct
  source 1..16: mol_type = other DNA
cagaatttgacttgaa

SEQ ID NO: 1377 - DNA, 16 bp, synthetic construct
  source 1..16: mol_type = other DNA
tcagaatttgacttga

SEQ ID NO: 1378 - DNA, 16 bp, synthetic construct
  source 1..16: mol_type = other DNA
ggctcagaatttgact

SEQ ID NO: 1379 - DNA, 16 bp, synthetic construct
  source 1..16: mol_type = other DNA
aggctcagaatttgac

SEQ ID NO: 1380 - DNA, 16 bp, synthetic construct
  source 1..16: mol_type = other DNA
ccccaggctcagaatt

SEQ ID NO: 1381 - DNA, 16 bp, synthetic construct
  source 1..16: mol_type = other DNA
agatgaggacccccca

SEQ ID NO: 1382 - DNA, 16 bp, synthetic construct
  source 1..16: mol_type = other DNA
cagatgaggacccccc

SEQ ID NO: 1383 - DNA, 16 bp, synthetic construct
  source 1..16: mol_type = other DNA
gcagatgaggaccccc

SEQ ID NO: 1384 - DNA, 16 bp, synthetic construct
  source 1..16: mol_type = other DNA
actctccatgctttgc

SEQ ID NO: 1385 - DNA, 16 bp, synthetic construct
  source 1..16: mol_type = other DNA
cactctccatgctttg

SEQ ID NO: 1386 - DNA, 16 bp, synthetic construct
  source 1..16: mol_type = other DNA
atgccactctccatgc

SEQ ID NO: 1387 - DNA, 16 bp, synthetic construct
  source 1..16: mol_type = other DNA
atgcaaagaagatgcc

SEQ ID NO: 1388 - DNA, 16 bp, synthetic construct
  source 1..16: mol_type = other DNA
gtccttaggatgcaaa

SEQ ID NO: 1389 - DNA, 16 bp, synthetic construct
  source 1..16: mol_type = other DNA
cgtccttaggatgcaa

SEQ ID NO: 1390 - DNA, 16 bp, synthetic construct
  source 1..16: mol_type = other DNA
gcagctctgagtgcac

SEQ ID NO: 1391 - DNA, 16 bp, synthetic construct
  source 1..16: mol_type = other DNA
gacattgtcctcagca

SEQ ID NO: 1392 - DNA, 16 bp, synthetic construct
  source 1..16: mol_type = other DNA
cagacattgtcctcag

SEQ ID NO: 1393 - DNA, 16 bp, synthetic construct
  source 1..16: mol_type = other DNA
cacttatttgatgacc

SEQ ID NO: 1394 - DNA, 16 bp, synthetic construct
  source 1..16: mol_type = other DNA
gcacttatttgatgac

SEQ ID NO: 1395 - DNA, 16 bp, synthetic construct
  source 1..16: mol_type = other DNA
cgatggcaagcactta

SEQ ID NO: 1396 - DNA, 16 bp, synthetic construct
  source 1..16: mol_type = other DNA
tcgatggcaagcactt

SEQ ID NO: 1397 - DNA, 16 bp, synthetic construct
  source 1..16: mol_type = other DNA
ctcgatggcaagcact

SEQ ID NO: 1398 - DNA, 16 bp, synthetic construct
  source 1..16: mol_type = other DNA
atgtctcgatggcaag

SEQ ID NO: 1399 - DNA, 16 bp, synthetic construct
  source 1..16: mol_type = other DNA
aatgtctcgatggcaa

SEQ ID NO: 1400 - DNA, 16 bp, synthetic construct
  source 1..16: mol_type = other DNA
aaatgtctcgatggca

SEQ ID NO: 1401 - DNA, 16 bp, synthetic construct
  source 1..16: mol_type = other DNA
taaatgtctcgatggc

SEQ ID NO: 1402 - DNA, 16 bp, synthetic construct
  source 1..16: mol_type = other DNA
ataaatgtctcgatgg

SEQ ID NO: 1403 - DNA, 16 bp, synthetic construct
  source 1..16: mol_type = other DNA
tataaatgtctcgatg

SEQ ID NO: 1404 - DNA, 16 bp, synthetic construct
  source 1..16: mol_type = other DNA
atcaactcctttataa

SEQ ID NO: 1405 - DNA, 16 bp, synthetic construct
  source 1..16: mol_type = other DNA
tatcaactcctttata

SEQ ID NO: 1406 - DNA, 16 bp, synthetic construct
  source 1..16: mol_type = other DNA
catatcaactccttta

SEQ ID NO: 1407 - DNA, 16 bp, synthetic construct
  source 1..16: mol_type = other DNA
ctctcatatcaactcc

SEQ ID NO: 1408 - DNA, 16 bp, synthetic construct
  source 1..16: mol_type = other DNA
cctctcatatcaactc

SEQ ID NO: 1409 - DNA, 16 bp, synthetic construct
  source 1..16: mol_type = other DNA
tcctctcatatcaact

SEQ ID NO: 1410 - DNA, 16 bp, synthetic construct
  source 1..16: mol_type = other DNA
actcctctcatatcaa

SEQ ID NO: 1411 - DNA, 16 bp, synthetic construct
  source 1..16: mol_type = other DNA
gactcctctcatatca

SEQ ID NO: 1412 - DNA, 16 bp, synthetic construct
  source 1..16: mol_type = other DNA
tgactcctctcatatc

SEQ ID NO: 1413 - DNA, 16 bp, synthetic construct
  source 1..16: mol_type = other DNA
ttgactcctctcatat

SEQ ID NO: 1414 - DNA, 16 bp, synthetic construct
  source 1..16: mol_type = other DNA
aaaattgactcctctc

SEQ ID NO: 1415 - DNA, 16 bp, synthetic construct
  source 1..16: mol_type = other DNA
ttaaaattgactcctc

SEQ ID NO: 1416 - DNA, 16 bp, synthetic construct
  source 1..16: mol_type = other DNA
ccttagacacattaaa

SEQ ID NO: 1417 - DNA, 16 bp, synthetic construct
  source 1..16: mol_type = other DNA
accttagacacattaa

SEQ ID NO: 1418 - DNA, 16 bp, synthetic construct
  source 1..16: mol_type = other DNA
aaccttagacacatta

SEQ ID NO: 1419 - DNA, 16 bp, synthetic construct
  source 1..16: mol_type = other DNA
ctaaccttagacacat

SEQ ID NO: 1420 - DNA, 16 bp, synthetic construct
  source 1..16: mol_type = other DNA
gctaaccttagacaca

SEQ ID NO: 1421 - DNA, 16 bp, synthetic construct
  source 1..16: mol_type = other DNA
tgctaaccttagacac

SEQ ID NO: 1422 - DNA, 16 bp, synthetic construct
  source 1..16: mol_type = other DNA
ctgctaaccttagaca

SEQ ID NO: 1423 - DNA, 16 bp, synthetic construct
  source 1..16: mol_type = other DNA
actgctaaccttagac

SEQ ID NO: 1424 - DNA, 16 bp, synthetic construct
  source 1..16: mol_type = other DNA
cactgctaaccttaga

SEQ ID NO: 1425 - DNA, 16 bp, synthetic construct
  source 1..16: mol_type = other DNA
acactgctaaccttag

SEQ ID NO: 1426 - DNA, 16 bp, synthetic construct
  source 1..16: mol_type = other DNA
aacactgctaacctta

SEQ ID NO: 1427 - DNA, 16 bp, synthetic construct
  source 1..16: mol_type = other DNA
tcaacactgctaacct

SEQ ID NO: 1428 - DNA, 16 bp, synthetic construct
  source 1..16: mol_type = other DNA
ttcaacactgctaacc

SEQ ID NO: 1429 - DNA, 16 bp, synthetic construct
  source 1..16: mol_type = other DNA
attcttcaacactgct

SEQ ID NO: 1430 - DNA, 16 bp, synthetic construct
  source 1..16: mol_type = other DNA
ctggcagcgaatgtta

SEQ ID NO: 1431 - DNA, 16 bp, synthetic construct
  source 1..16: mol_type = other DNA
actggcagcgaatgtt

SEQ ID NO: 1432 - DNA, 16 bp, synthetic construct
  source 1..16: mol_type = other DNA
cgtggcatatgaaaaa

SEQ ID NO: 1433 - DNA, 16 bp, synthetic construct
  source 1..16: mol_type = other DNA
ctctgccttgtgaaat

SEQ ID NO: 1434 - DNA, 16 bp, synthetic construct
  source 1..16: mol_type = other DNA
cggtactctgccttgt

SEQ ID NO: 1435 - DNA, 16 bp, synthetic construct
  source 1..16: mol_type = other DNA
ttccggtactctgcct

SEQ ID NO: 1436 - DNA, 16 bp, synthetic construct
  source 1..16: mol_type = other DNA
ttgttccggtactctg

SEQ ID NO: 1437 - DNA, 16 bp, synthetic construct
  source 1..16: mol_type = other DNA
attgttccggtactct

SEQ ID NO: 1438 - DNA, 16 bp, synthetic construct
  source 1..16: mol_type = other DNA
caattgttccggtact

SEQ ID NO: 1439 - DNA, 16 bp, synthetic construct
  source 1..16: mol_type = other DNA
gcaattgttccggtac

SEQ ID NO: 1440 - DNA, 16 bp, synthetic construct
  source 1..16: mol_type = other DNA
ggcaattgttccggta

SEQ ID NO: 1441 - DNA, 16 bp, synthetic construct
  source 1..16: mol_type = other DNA
ctttaataggcaattg

SEQ ID NO: 1442 - DNA, 16 bp, synthetic construct
  source 1..16: mol_type = other DNA
gtactttaataggcaa

SEQ ID NO: 1443 - DNA, 16 bp, synthetic construct
  source 1..16: mol_type = other DNA
tgtactttaataggca

SEQ ID NO: 1444 - DNA, 16 bp, synthetic construct
  source 1..16: mol_type = other DNA
ctgtactttaataggc

SEQ ID NO: 1445 - DNA, 16 bp, synthetic construct
  source 1..16: mol_type = other DNA
actgtactttaatagg

SEQ ID NO: 1446 - DNA, 16 bp, synthetic construct
  source 1..16: mol_type = other DNA
ctcagcacctttatag

SEQ ID NO: 1447 - DNA, 16 bp, synthetic construct
  source 1..16: mol_type = other DNA
actcagcacctttata

SEQ ID NO: 1448 - DNA, 16 bp, synthetic construct
  source 1..16: mol_type = other DNA
tactcagcacctttat

SEQ ID NO: 1449 - DNA, 16 bp, synthetic construct
  source 1..16: mol_type = other DNA
ttactcagcaccttta

SEQ ID NO: 1450 - DNA, 16 bp, synthetic construct
  source 1..16: mol_type = other DNA
atttctgaaagggcac

SEQ ID NO: 1451 - DNA, 16 bp, synthetic construct
  source 1..16: mol_type = other DNA
caatttctgaaagggc

SEQ ID NO: 1452 - DNA, 16 bp, synthetic construct
  source 1..16: mol_type = other DNA
ccaatttctgaaaggg

SEQ ID NO: 1453 - DNA, 16 bp, synthetic construct
  source 1..16: mol_type = other DNA
accaatttctgaaagg

SEQ ID NO: 1454 - DNA, 16 bp, synthetic construct
  source 1..16: mol_type = other DNA
tggcaaccaatttctg

SEQ ID NO: 1455 - DNA, 16 bp, synthetic construct
  source 1..16: mol_type = other DNA
atccacatctgagaac

SEQ ID NO: 1456 - DNA, 16 bp, synthetic construct
  source 1..16: mol_type = other DNA
gcaacatccacatctg

SEQ ID NO: 1457 - DNA, 16 bp, synthetic construct
  source 1..16: mol_type = other DNA
ggcaacatccacatct

SEQ ID NO: 1458 - DNA, 16 bp, synthetic construct
  source 1..16: mol_type = other DNA
tggcaacatccacatc

SEQ ID NO: 1459 - DNA, 16 bp, synthetic construct
  source 1..16: mol_type = other DNA
cctggcaacatccaca

SEQ ID NO: 1460 - DNA, 16 bp, synthetic construct
  source 1..16: mol_type = other DNA
accctggcaacatcca

SEQ ID NO: 1461 - DNA, 16 bp, synthetic construct
  source 1..16: mol_type = other DNA
aaccctggcaacatcc

SEQ ID NO: 1462 - DNA, 16 bp, synthetic construct
  source 1..16: mol_type = other DNA
gaaccctggcaacatc

SEQ ID NO: 1463 - DNA, 16 bp, synthetic construct
  source 1..16: mol_type = other DNA
tgaacggtcttcaagc

SEQ ID NO: 1464 - DNA, 16 bp, synthetic construct
  source 1..16: mol_type = other DNA
atgaacggtcttcaag

SEQ ID NO: 1465 - DNA, 16 bp, synthetic construct
  source 1..16: mol_type = other DNA
taaaaatgaacggtct

SEQ ID NO: 1466 - DNA, 16 bp, synthetic construct
  source 1..16: mol_type = other DNA
gagtctcttgtcactt

SEQ ID NO: 1467 - DNA, 16 bp, synthetic construct
  source 1..16: mol_type = other DNA
tgagtctcttgtcact

SEQ ID NO: 1468 - DNA, 16 bp, synthetic construct
  source 1..16: mol_type = other DNA
ggtgagtctcttgtca

SEQ ID NO: 1469 - DNA, 16 bp, synthetic construct
  source 1..16: mol_type = other DNA
aggtgagtctcttgtc

SEQ ID NO: 1470 - DNA, 16 bp, synthetic construct
  source 1..16: mol_type = other DNA
tggaggtgagtctctt

SEQ ID NO: 1471 - DNA, 16 bp, synthetic construct
  source 1..16: mol_type = other DNA
ttggaggtgagtctct

SEQ ID NO: 1472 - DNA, 16 bp, synthetic construct
  source 1..16: mol_type = other DNA
cttggaggtgagtctc

SEQ ID NO: 1473 - DNA, 16 bp, synthetic construct
  source 1..16: mol_type = other DNA
tcttggaggtgagtct

SEQ ID NO: 1474 - DNA, 16 bp, synthetic construct
  source 1..16: mol_type = other DNA
ttgcttcttggaggtg

SEQ ID NO: 1475 - DNA, 16 bp, synthetic construct
  source 1..16: mol_type = other DNA
attgcttcttggaggt

SEQ ID NO: 1476 - DNA, 16 bp, synthetic construct
  source 1..16: mol_type = other DNA
caattgcttcttggag

SEQ ID NO: 1477 - DNA, 16 bp, synthetic construct
  source 1..16: mol_type = other DNA
cacaattgcttcttgg

SEQ ID NO: 1478 - DNA, 16 bp, synthetic construct
  source 1..16: mol_type = other DNA
gcttgaataaaatcat

SEQ ID NO: 1479 - DNA, 16 bp, synthetic construct
  source 1..16: mol_type = other DNA
gttgcttgcttgaata

SEQ ID NO: 1480 - DNA, 16 bp, synthetic construct
  source 1..16: mol_type = other DNA
agttgcttgcttgaat

SEQ ID NO: 1481 - DNA, 16 bp, synthetic construct
  source 1..16: mol_type = other DNA
aagttgcttgcttgaa

SEQ ID NO: 1482 - DNA, 16 bp, synthetic construct
  source 1..16: mol_type = other DNA
taagttgcttgcttga

SEQ ID NO: 1483 - DNA, 16 bp, synthetic construct
  source 1..16: mol_type = other DNA
gaaataagttgcttgc

SEQ ID NO: 1484 - DNA, 16 bp, synthetic construct
  source 1..16: mol_type = other DNA
tgaaataagttgcttg

SEQ ID NO: 1485 - DNA, 16 bp, synthetic construct
  source 1..16: mol_type = other DNA
actgtagcaaacaagg

SEQ ID NO: 1486 - DNA, 16 bp, synthetic construct
  source 1..16: mol_type = other DNA
tccacaggaaactgta

SEQ ID NO: 1487 - DNA, 16 bp, synthetic construct
  source 1..16: mol_type = other DNA
atccacaggaaactgt

SEQ ID NO: 1488 - DNA, 16 bp, synthetic construct
  source 1..16: mol_type = other DNA
tcatagagttgagtca

SEQ ID NO: 1489 - DNA, 16 bp, synthetic construct
  source 1..16: mol_type = other DNA
acctctgaagaaggcg

SEQ ID NO: 1490 - DNA, 16 bp, synthetic construct
  source 1..16: mol_type = other DNA
atccccacctctgaag

SEQ ID NO: 1491 - DNA, 16 bp, synthetic construct
  source 1..16: mol_type = other DNA
agctacatccccacct

SEQ ID NO: 1492 - DNA, 16 bp, synthetic construct
  source 1..16: mol_type = other DNA
gaagctacatccccac

SEQ ID NO: 1493 - DNA, 16 bp, synthetic construct
  source 1..16: mol_type = other DNA
acatggaagctacatc

SEQ ID NO: 1494 - DNA, 16 bp, synthetic construct
  source 1..16: mol_type = other DNA
tacatggaagctacat

SEQ ID NO: 1495 - DNA, 16 bp, synthetic construct
  source 1..16: mol_type = other DNA
gtacatggaagctaca

SEQ ID NO: 1496 - DNA, 16 bp, synthetic construct
  source 1..16: mol_type = other DNA
tgtacatggaagctac

SEQ ID NO: 1497 - DNA, 16 bp, synthetic construct
  source 1..16: mol_type = other DNA
gtgtacatggaagcta

SEQ ID NO: 1498 - DNA, 16 bp, synthetic construct
  source 1..16: mol_type = other DNA
gggtgtacatggaagc

SEQ ID NO: 1499 - DNA, 16 bp, synthetic construct
  source 1..16: mol_type = other DNA
gcagtattgggcattt

SEQ ID NO: 1500 - DNA, 16 bp, synthetic construct
  source 1..16: mol_type = other DNA
catctggcagtattgg

SEQ ID NO: 1501 - DNA, 16 bp, synthetic construct
  source 1..16: mol_type = other DNA
tcatctggcagtattg

SEQ ID NO: 1502 - DNA, 16 bp, synthetic construct
  source 1..16: mol_type = other DNA
cctcatctggcagtat

SEQ ID NO: 1503 - DNA, 16 bp, synthetic construct
  source 1..16: mol_type = other DNA
acctcatctggcagta

SEQ ID NO: 1504 - DNA, 16 bp, synthetic construct
  source 1..16: mol_type = other DNA
gtgcacctcatctggc

SEQ ID NO: 1505 - DNA, 16 bp, synthetic construct
  source 1..16: mol_type = other DNA
ggtggaatgtgcacct

SEQ ID NO: 1506 - DNA, 16 bp, synthetic construct
  source 1..16: mol_type = other DNA
gggtggaatgtgcacc

SEQ ID NO: 1507 - DNA, 16 bp, synthetic construct
  source 1..16: mol_type = other DNA
aacttgctggaagaaa

SEQ ID NO: 1508 - DNA, 16 bp, synthetic construct
  source 1..16: mol_type = other DNA
gaacttgctggaagaa

SEQ ID NO: 1509 - DNA, 16 bp, synthetic construct
  source 1..16: mol_type = other DNA
tgaacttgctggaaga

SEQ ID NO: 1510 - DNA, 16 bp, synthetic construct
  source 1..16: mol_type = other DNA
gattgaacttgctgga

SEQ ID NO: 1511 - DNA, 16 bp, synthetic construct
  source 1..16: mol_type = other DNA
cattgattgaacttgc

SEQ ID NO: 1512 - DNA, 16 bp, synthetic construct
  source 1..16: mol_type = other DNA
tcattgattgaacttg

SEQ ID NO: 1513 - DNA, 16 bp, synthetic construct
  source 1..16: mol_type = other DNA
caaaccttttctccat

SEQ ID NO: 1514 - DNA, 16 bp, synthetic construct
  source 1..16: mol_type = other DNA
gcaaccaaaccttttc

SEQ ID NO: 1515 - DNA, 16 bp, synthetic construct
  source 1..16: mol_type = other DNA
agcaaccaaacctttt

SEQ ID NO: 1516 - DNA, 16 bp, synthetic construct
  source 1..16: mol_type = other DNA
cgatgtacttttggca

SEQ ID NO: 1517 - DNA, 16 bp, synthetic construct
  source 1..16: mol_type = other DNA
tcgatgtacttttggc

SEQ ID NO: 1518 - DNA, 16 bp, synthetic construct
  source 1..16: mol_type = other DNA
ttcgatgtacttttgg

SEQ ID NO: 1519 - DNA, 16 bp, synthetic construct
  source 1..16: mol_type = other DNA
gttcgatgtacttttg

SEQ ID NO: 1520 - DNA, 16 bp, synthetic construct
  source 1..16: mol_type = other DNA
cctgttcgatgtactt

SEQ ID NO: 1521 - DNA, 16 bp, synthetic construct
  source 1..16: mol_type = other DNA
acctgttcgatgtact

SEQ ID NO: 1522 - DNA, 16 bp, synthetic construct
  source 1..16: mol_type = other DNA
gcacctgttcgatgta

SEQ ID NO: 1523 - DNA, 16 bp, synthetic construct
  source 1..16: mol_type = other DNA
ctgcacctgttcgatg

SEQ ID NO: 1524 - DNA, 16 bp, synthetic construct
  source 1..16: mol_type = other DNA
actgcacctgttcgat

SEQ ID NO: 1525 - DNA, 16 bp, synthetic construct
  source 1..16: mol_type = other DNA
aactgcacctgttcga

SEQ ID NO: 1526 - DNA, 16 bp, synthetic construct
  source 1..16: mol_type = other DNA
aaactgcacctgttcg

SEQ ID NO: 1527 - DNA, 16 bp, synthetic construct
  source 1..16: mol_type = other DNA
ccagaaactgcacctg

SEQ ID NO: 1528 - DNA, 16 bp, synthetic construct
  source 1..16: mol_type = other DNA
tccagaaactgcacct

SEQ ID NO: 1529 - DNA, 16 bp, synthetic construct
  source 1..16: mol_type = other DNA
tgtccagaaactgcac

SEQ ID NO: 1530 - DNA, 16 bp, synthetic construct
  source 1..16: mol_type = other DNA
cttcaaggaatgtcca

SEQ ID NO: 1531 - DNA, 16 bp, synthetic construct
  source 1..16: mol_type = other DNA
gcttcaaggaatgtcc

SEQ ID NO: 1532 - DNA, 16 bp, synthetic construct
  source 1..16: mol_type = other DNA
ttgcttcaaggaatgt

SEQ ID NO: 1533 - DNA, 16 bp, synthetic construct
  source 1..16: mol_type = other DNA
cacattgcttcaagga

SEQ ID NO: 1534 - DNA, 16 bp, synthetic construct
  source 1..16: mol_type = other DNA
gatgaccacattgctt

SEQ ID NO: 1535 - DNA, 16 bp, synthetic construct
  source 1..16: mol_type = other DNA
ctcatatcaactcctt

SEQ ID NO: 1536 - DNA, 16 bp, synthetic construct
  source 1..16: mol_type = other DNA
caacactgctaacctt

SEQ ID NO: 1537 - DNA, 16 bp, synthetic construct
  source 1..16: mol_type = other DNA
ccggtactctgccttg

SEQ ID NO: 1538 - DNA, 16 bp, synthetic construct
  source 1..16: mol_type = other DNA
tccggtactctgcctt

SEQ ID NO: 1539 - DNA, 16 bp, synthetic construct
  source 1..16: mol_type = other DNA
aggcaattgttccggt

SEQ ID NO: 1540 - DNA, 16 bp, synthetic construct
  source 1..16: mol_type = other DNA
taggcaattgttccgg

SEQ ID NO: 1541 - DNA, 16 bp, synthetic construct
  source 1..16: mol_type = other DNA
ataggcaattgttccg

SEQ ID NO: 1542 - DNA, 16 bp, synthetic construct
  source 1..16: mol_type = other DNA
gagaaccctggcaaca

SEQ ID NO: 1543 - DNA, 16 bp, synthetic construct
  source 1..16: mol_type = other DNA
tgagaaccctggcaac

SEQ ID NO: 1544 - DNA, 16 bp, synthetic construct
  source 1..16: mol_type = other DNA
tggagtgagaaccctg

SEQ ID NO: 1545 - DNA, 16 bp, synthetic construct
  source 1..16: mol_type = other DNA
atctggagtgagaacc

SEQ ID NO: 1546 - DNA, 16 bp, synthetic construct
  source 1..16: mol_type = other DNA
gtccgacacacaaaag

SEQ ID NO: 1547 - DNA, 16 bp, synthetic construct
  source 1..16: mol_type = other DNA
ggtccgacacacaaaa

SEQ ID NO: 1548 - DNA, 16 bp, synthetic construct
  source 1..16: mol_type = other DNA
atggtccgacacacaa

SEQ ID NO: 1549 - DNA, 16 bp, synthetic construct
  source 1..16: mol_type = other DNA
gatggtccgacacaca

SEQ ID NO: 1550 - DNA, 16 bp, synthetic construct
  source 1..16: mol_type = other DNA
agatggtccgacacac

SEQ ID NO: 1551 - DNA, 16 bp, synthetic construct
  source 1..16: mol_type = other DNA
tgataggtgcagatgg

SEQ ID NO: 1552 - DNA, 16 bp, synthetic construct
  source 1..16: mol_type = other DNA
gtgataggtgcagatg

SEQ ID NO: 1553 - DNA, 16 bp, synthetic construct
  source 1..16: mol_type = other DNA
cgattttccatacatt

SEQ ID NO: 1554 - DNA, 16 bp, synthetic construct
  source 1..16: mol_type = other DNA
tcgattttccatacat

SEQ ID NO: 1555 - DNA, 16 bp, synthetic construct
  source 1..16: mol_type = other DNA
ctcgattttccataca

SEQ ID NO: 1556 - DNA, 16 bp, synthetic construct
  source 1..16: mol_type = other DNA
actcgattttccatac

SEQ ID NO: 1557 - DNA, 16 bp, synthetic construct
  source 1..16: mol_type = other DNA
gactcgattttccata

SEQ ID NO: 1558 - DNA, 16 bp, synthetic construct
  source 1..16: mol_type = other DNA
tgtgactcgattttcc

SEQ ID NO: 1559 - DNA, 16 bp, synthetic construct
  source 1..16: mol_type = other DNA
ttgtgactcgattttc

SEQ ID NO: 1560 - DNA, 16 bp, synthetic construct
  source 1..16: mol_type = other DNA
tttgtgactcgatttt

SEQ ID NO: 1561 - DNA, 16 bp, synthetic construct
  source 1..16: mol_type = other DNA
tttctttgtgactcga

SEQ ID NO: 1562 - DNA, 16 bp, synthetic construct
  source 1..16: mol_type = other DNA
gtgtgccactttcaga

SEQ ID NO: 1563 - DNA, 16 bp, synthetic construct
  source 1..16: mol_type = other DNA
ggtgtgccactttcag

SEQ ID NO: 1564 - DNA, 16 bp, synthetic construct
  source 1..16: mol_type = other DNA
tggtgtgccactttca

SEQ ID NO: 1565 - DNA, 16 bp, synthetic construct
  source 1..16: mol_type = other DNA
acttggtgtgccactt

SEQ ID NO: 1566 - DNA, 16 bp, synthetic construct
  source 1..16: mol_type = other DNA
aacttggtgtgccact

SEQ ID NO: 1567 - DNA, 16 bp, synthetic construct
  source 1..16: mol_type = other DNA
gaacttggtgtgccac

SEQ ID NO: 1568 - DNA, 16 bp, synthetic construct
  source 1..16: mol_type = other DNA
ggaacttggtgtgcca

SEQ ID NO: 1569 - DNA, 16 bp, synthetic construct
  source 1..16: mol_type = other DNA
aggaacttggtgtgcc

SEQ ID NO: 1570 - DNA, 16 bp, synthetic construct
  source 1..16: mol_type = other DNA
gtgttttcttgaggag

SEQ ID NO: 1571 - DNA, 16 bp, synthetic construct
  source 1..16: mol_type = other DNA
ggtgttttcttgagga

SEQ ID NO: 1572 - DNA, 16 bp, synthetic construct
  source 1..16: mol_type = other DNA
agatatggtgttttct

SEQ ID NO: 1573 - DNA, 16 bp, synthetic construct
  source 1..16: mol_type = other DNA
cagatatggtgttttc

SEQ ID NO: 1574 - DNA, 16 bp, synthetic construct
  source 1..16: mol_type = other DNA
ctatatccagatatgg

SEQ ID NO: 1575 - DNA, 16 bp, synthetic construct
  source 1..16: mol_type = other DNA
taaaaggctatatcca

SEQ ID NO: 1576 - DNA, 16 bp, synthetic construct
  source 1..16: mol_type = other DNA
gttaaaaggctatatc

SEQ ID NO: 1577 - DNA, 16 bp, synthetic construct
  source 1..16: mol_type = other DNA
ggttaaaaggctatat

SEQ ID NO: 1578 - DNA, 16 bp, synthetic construct
  source 1..16: mol_type = other DNA
caggttaaaaggctat

SEQ ID NO: 1579 - DNA, 16 bp, synthetic construct
  source 1..16: mol_type = other DNA
gcaggttaaaaggcta

SEQ ID NO: 1580 - DNA, 16 bp, synthetic construct
  source 1..16: mol_type = other DNA
tgcaggttaaaaggct

SEQ ID NO: 1581 - DNA, 16 bp, synthetic construct
  source 1..16: mol_type = other DNA
ttgcaggttaaaaggc

SEQ ID NO: 1582 - DNA, 16 bp, synthetic construct
  source 1..16: mol_type = other DNA
tttgcaggttaaaagg

SEQ ID NO: 1583 - DNA, 16 bp, synthetic construct
  source 1..16: mol_type = other DNA
gttcaggtaaagttct

SEQ ID NO: 1584 - DNA, 16 bp, synthetic construct
  source 1..16: mol_type = other DNA
ggttcaggtaaagttc

SEQ ID NO: 1585 - DNA, 16 bp, synthetic construct
  source 1..16: mol_type = other DNA
gggttcaggtaaagtt

SEQ ID NO: 1586 - DNA, 16 bp, synthetic construct
  source 1..16: mol_type = other DNA
agggttcaggtaaagt

SEQ ID NO: 1587 - DNA, 16 bp, synthetic construct
  source 1..16: mol_type = other DNA
ggcagggttcaggtaa

SEQ ID NO: 1588 - DNA, 16 bp, synthetic construct
  source 1..16: mol_type = other DNA
ttagaatggcagggtt

SEQ ID NO: 1589 - DNA, 16 bp, synthetic construct
  source 1..16: mol_type = other DNA
tcccgggtaaatttta

SEQ ID NO: 1590 - DNA, 16 bp, synthetic construct
  source 1..16: mol_type = other DNA
ctcccgggtaaatttt

SEQ ID NO: 1591 - DNA, 16 bp, synthetic construct
  source 1..16: mol_type = other DNA
tcaactcccgggtaaa

SEQ ID NO: 1592 - DNA, 16 bp, synthetic construct
  source 1..16: mol_type = other DNA
aagtcaactcccgggt

SEQ ID NO: 1593 - DNA, 16 bp, synthetic construct
  source 1..16: mol_type = other DNA
aaagtcaactcccggg

SEQ ID NO: 1594 - DNA, 16 bp, synthetic construct
  source 1..16: mol_type = other DNA
caaagtcaactcccgg

SEQ ID NO: 1595 - DNA, 16 bp, synthetic construct
  source 1..16: mol_type = other DNA
ccaaagtcaactcccg

SEQ ID NO: 1596 - DNA, 16 bp, synthetic construct
  source 1..16: mol_type = other DNA
cctccaaagtcaactc

SEQ ID NO: 1597 - DNA, 16 bp, synthetic construct
  source 1..16: mol_type = other DNA
cttggcaaacattcac

SEQ ID NO: 1598 - DNA, 16 bp, synthetic construct
  source 1..16: mol_type = other DNA
gtctcttggcaaacat

SEQ ID NO: 1599 - DNA, 16 bp, synthetic construct
  source 1..16: mol_type = other DNA
aagtctcttggcaaac

SEQ ID NO: 1600 - DNA, 16 bp, synthetic construct
  source 1..16: mol_type = other DNA
tctttgtgcaagtctc

SEQ ID NO: 1601 - DNA, 16 bp, synthetic construct
  source 1..16: mol_type = other DNA
aatcatctttgtgcaa

SEQ ID NO: 1602 - DNA, 16 bp, synthetic construct
  source 1..16: mol_type = other DNA
gaatcatctttgtgca

SEQ ID NO: 1603 - DNA, 16 bp, synthetic construct
  source 1..16: mol_type = other DNA
cgaatcatctttgtgc

SEQ ID NO: 1604 - DNA, 16 bp, synthetic construct
  source 1..16: mol_type = other DNA
gcgaatcatctttgtg

SEQ ID NO: 1605 - DNA, 16 bp, synthetic construct
  source 1..16: mol_type = other DNA
cagcgaatcatctttg

SEQ ID NO: 1606 - DNA, 16 bp, synthetic construct
  source 1..16: mol_type = other DNA
acagcgaatcatcttt

SEQ ID NO: 1607 - DNA, 16 bp, synthetic construct
  source 1..16: mol_type = other DNA
tgacagcgaatcatct

SEQ ID NO: 1608 - DNA, 16 bp, synthetic construct
  source 1..16: mol_type = other DNA
ctgacagcgaatcatc

SEQ ID NO: 1609 - DNA, 16 bp, synthetic construct
  source 1..16: mol_type = other DNA
actgacagcgaatcat

SEQ ID NO: 1610 - DNA, 16 bp, synthetic construct
  source 1..16: mol_type = other DNA
tacagtcttctgggag

SEQ ID NO: 1611 - DNA, 16 bp, synthetic construct
  source 1..16: mol_type = other DNA
ccttacagtcttctgg

SEQ ID NO: 1612 - DNA, 16 bp, synthetic construct
  source 1..16: mol_type = other DNA
tagataatcttaagaa

SEQ ID NO: 1613 - DNA, 16 bp, synthetic construct
  source 1..16: mol_type = other DNA
ccatccatagataatc

SEQ ID NO: 1614 - DNA, 16 bp, synthetic construct
  source 1..16: mol_type = other DNA
gtgtcccatacgcaat

SEQ ID NO: 1615 - DNA, 16 bp, synthetic construct
  source 1..16: mol_type = other DNA
tgtgtcccatacgcaa

SEQ ID NO: 1616 - DNA, 16 bp, synthetic construct
  source 1..16: mol_type = other DNA
ttgtgtcccatacgca

SEQ ID NO: 1617 - DNA, 16 bp, synthetic construct
  source 1..16: mol_type = other DNA
cttgtgtcccatacgc

SEQ ID NO: 1618 - DNA, 16 bp, synthetic construct
  source 1..16: mol_type = other DNA
ccttgtgtcccatacg

SEQ ID NO: 1619 - DNA, 16 bp, synthetic construct
  source 1..16: mol_type = other DNA
cccttgtgtcccatac

SEQ ID NO: 1620 - DNA, 16 bp, synthetic construct
  source 1..16: mol_type = other DNA
accagagctcccttgt

SEQ ID NO: 1621 - DNA, 16 bp, synthetic construct
  source 1..16: mol_type = other DNA
aaccagagctcccttg

SEQ ID NO: 1622 - DNA, 16 bp, synthetic construct
  source 1..16: mol_type = other DNA
taaccagagctccctt

SEQ ID NO: 1623 - DNA, 16 bp, synthetic construct
  source 1..16: mol_type = other DNA
agtaaccagagctccc

SEQ ID NO: 1624 - DNA, 16 bp, synthetic construct
  source 1..16: mol_type = other DNA
agagtaaccagagctc

SEQ ID NO: 1625 - DNA, 16 bp, synthetic construct
  source 1..16: mol_type = other DNA
caaagagtaaccagag

SEQ ID NO: 1626 - DNA, 16 bp, synthetic construct
  source 1..16: mol_type = other DNA
ctcaaagagtaaccag

SEQ ID NO: 1627 - DNA, 16 bp, synthetic construct
  source 1..16: mol_type = other DNA
tctcaaagagtaacca

SEQ ID NO: 1628 - DNA, 16 bp, synthetic construct
  source 1..16: mol_type = other DNA
gttacacaatctcaaa

SEQ ID NO: 1629 - DNA, 16 bp, synthetic construct
  source 1..16: mol_type = other DNA
agtgttacacaatctc

SEQ ID NO: 1630 - DNA, 16 bp, synthetic construct
  source 1..16: mol_type = other DNA
ccagtgttacacaatc

SEQ ID NO: 1631 - DNA, 16 bp, synthetic construct
  source 1..16: mol_type = other DNA
tccccagtgttacaca

SEQ ID NO: 1632 - DNA, 16 bp, synthetic construct
  source 1..16: mol_type = other DNA
gtccccagtgttacac

SEQ ID NO: 1633 - DNA, 16 bp, synthetic construct
  source 1..16: mol_type = other DNA
tgtccccagtgttaca

SEQ ID NO: 1634 - DNA, 16 bp, synthetic construct
  source 1..16: mol_type = other DNA
ttgtccccagtgttac

SEQ ID NO: 1635 - DNA, 16 bp, synthetic construct
  source 1..16: mol_type = other DNA
aagagtttgttcctcc

SEQ ID NO: 1636 - DNA, 16 bp, synthetic construct
  source 1..16: mol_type = other DNA
caagaagagtttgttc

SEQ ID NO: 1637 - DNA, 16 bp, synthetic construct
  source 1..16: mol_type = other DNA
ccaagaagagtttgtt

SEQ ID NO: 1638 - DNA, 16 bp, synthetic construct
  source 1..16: mol_type = other DNA
ccccaagaagagtttg

SEQ ID NO: 1639 - DNA, 16 bp, synthetic construct
  source 1..16: mol_type = other DNA
tccccaagaagagttt

SEQ ID NO: 1640 - DNA, 16 bp, synthetic construct
  source 1..16: mol_type = other DNA
cactctccccaagaag

SEQ ID NO: 1641 - DNA, 16 bp, synthetic construct
  source 1..16: mol_type = other DNA
ccactctccccaagaa

SEQ ID NO: 1642 - DNA, 16 bp, synthetic construct
  source 1..16: mol_type = other DNA
gcttcacctgcaggct

SEQ ID NO: 1643 - DNA, 16 bp, synthetic construct
  source 1..16: mol_type = other DNA
gctgtcagcttcacct

SEQ ID NO: 1644 - DNA, 16 bp, synthetic construct
  source 1..16: mol_type = other DNA
tgagctgtcagcttca

SEQ ID NO: 1645 - DNA, 16 bp, synthetic construct
  source 1..16: mol_type = other DNA
gtcctatgagtgaccc

SEQ ID NO: 1646 - DNA, 16 bp, synthetic construct
  source 1..16: mol_type = other DNA
gtgtcctatgagtgac

SEQ ID NO: 1647 - DNA, 16 bp, synthetic construct
  source 1..16: mol_type = other DNA
ggtgtcctatgagtga

SEQ ID NO: 1648 - DNA, 16 bp, synthetic construct
  source 1..16: mol_type = other DNA
tggtgtcctatgagtg

SEQ ID NO: 1649 - DNA, 16 bp, synthetic construct
  source 1..16: mol_type = other DNA
ctggtgtcctatgagt

SEQ ID NO: 1650 - DNA, 16 bp, synthetic construct
  source 1..16: mol_type = other DNA
gatgcgccaaacatcc

SEQ ID NO: 1651 - DNA, 16 bp, synthetic construct
  source 1..16: mol_type = other DNA
agatgcgccaaacatc

SEQ ID NO: 1652 - DNA, 16 bp, synthetic construct
  source 1..16: mol_type = other DNA
atagatgcgccaaaca

SEQ ID NO: 1653 - DNA, 16 bp, synthetic construct
  source 1..16: mol_type = other DNA
cactatagatgcgcca

SEQ ID NO: 1654 - DNA, 16 bp, synthetic construct
  source 1..16: mol_type = other DNA
ccactatagatgcgcc

SEQ ID NO: 1655 - DNA, 16 bp, synthetic construct
  source 1..16: mol_type = other DNA
aatgtctgacagattt

SEQ ID NO: 1656 - DNA, 16 bp, synthetic construct
  source 1..16: mol_type = other DNA
taatgtctgacagatt

SEQ ID NO: 1657 - DNA, 16 bp, synthetic construct
  source 1..16: mol_type = other DNA
gaaaggtgtatctttt

SEQ ID NO: 1658 - DNA, 16 bp, synthetic construct
  source 1..16: mol_type = other DNA
gtgagaaaggtgtatc

SEQ ID NO: 1659 - DNA, 16 bp, synthetic construct
  source 1..16: mol_type = other DNA
tgtgagaaaggtgtat

SEQ ID NO: 1660 - DNA, 16 bp, synthetic construct
  source 1..16: mol_type = other DNA
tttgtgagaaaggtgt

SEQ ID NO: 1661 - DNA, 16 bp, synthetic construct
  source 1..16: mol_type = other DNA
atttgtgagaaaggtg

SEQ ID NO: 1662 - DNA, 16 bp, synthetic construct
  source 1..16: mol_type = other DNA
tggtgaataataatct

SEQ ID NO: 1663 - DNA, 16 bp, synthetic construct
  source 1..16: mol_type = other DNA
ttatagttttggtgaa

SEQ ID NO: 1664 - DNA, 16 bp, synthetic construct
  source 1..16: mol_type = other DNA
tatcatgattcccttc

SEQ ID NO: 1665 - DNA, 16 bp, synthetic construct
  source 1..16: mol_type = other DNA
gatatcatgattccct

SEQ ID NO: 1666 - DNA, 16 bp, synthetic construct
  source 1..16: mol_type = other DNA
cgatatcatgattccc

SEQ ID NO: 1667 - DNA, 16 bp, synthetic construct
  source 1..16: mol_type = other DNA
gcgatatcatgattcc

SEQ ID NO: 1668 - DNA, 16 bp, synthetic construct
  source 1..16: mol_type = other DNA
aggcgatatcatgatt

SEQ ID NO: 1669 - DNA, 16 bp, synthetic construct
  source 1..16: mol_type = other DNA
aaggcgatatcatgat

SEQ ID NO: 1670 - DNA, 16 bp, synthetic construct
  source 1..16: mol_type = other DNA
caaaggagcctggagt

SEQ ID NO: 1671 - DNA, 16 bp, synthetic construct
  source 1..16: mol_type = other DNA
attcaaaggagcctgg

SEQ ID NO: 1672 - DNA, 16 bp, synthetic construct
  source 1..16: mol_type = other DNA
aattcaaaggagcctg

SEQ ID NO: 1673 - DNA, 16 bp, synthetic construct
  source 1..16: mol_type = other DNA
gtaattcaaaggagcc

SEQ ID NO: 1674 - DNA, 16 bp, synthetic construct
  source 1..16: mol_type = other DNA
gtgtaattcaaaggag

SEQ ID NO: 1675 - DNA, 16 bp, synthetic construct
  source 1..16: mol_type = other DNA
catattggtttttgga

SEQ ID NO: 1676 - DNA, 16 bp, synthetic construct
  source 1..16: mol_type = other DNA
gcatattggtttttgg

SEQ ID NO: 1677 - DNA, 16 bp, synthetic construct
  source 1..16: mol_type = other DNA
taggcatattggtttt

SEQ ID NO: 1678 - DNA, 16 bp, synthetic construct
  source 1..16: mol_type = other DNA
cttgtgtcacctttgg

SEQ ID NO: 1679 - DNA, 16 bp, synthetic construct
  source 1..16: mol_type = other DNA
gcttgtgtcacctttg

SEQ ID NO: 1680 - DNA, 16 bp, synthetic construct
  source 1..16: mol_type = other DNA
ataaattgtgcttgtg

SEQ ID NO: 1681 - DNA, 16 bp, synthetic construct
  source 1..16: mol_type = other DNA
gtataaattgtgcttg

SEQ ID NO: 1682 - DNA, 16 bp, synthetic construct
  source 1..16: mol_type = other DNA
tggtataaattgtgct

SEQ ID NO: 1683 - DNA, 16 bp, synthetic construct
  source 1..16: mol_type = other DNA
ttggtataaattgtgc

SEQ ID NO: 1684 - DNA, 16 bp, synthetic construct
  source 1..16: mol_type = other DNA
cagttggtataaattg

SEQ ID NO: 1685 - DNA, 16 bp, synthetic construct
  source 1..16: mol_type = other DNA
caacagttggtataaa

SEQ ID NO: 1686 - DNA, 16 bp, synthetic construct
  source 1..16: mol_type = other DNA
ccaacagttggtataa

SEQ ID NO: 1687 - DNA, 16 bp, synthetic construct
  source 1..16: mol_type = other DNA
cccaacagttggtata

SEQ ID NO: 1688 - DNA, 16 bp, synthetic construct
  source 1..16: mol_type = other DNA
agaagccccatccggt

SEQ ID NO: 1689 - DNA, 16 bp, synthetic construct
  source 1..16: mol_type = other DNA
tttctccttcgagaag

SEQ ID NO: 1690 - DNA, 16 bp, synthetic construct
  source 1..16: mol_type = other DNA
ctttctccttcgagaa

SEQ ID NO: 1691 - DNA, 16 bp, synthetic construct
  source 1..16: mol_type = other DNA
gggcttcagccagaca

SEQ ID NO: 1692 - DNA, 16 bp, synthetic construct
  source 1..16: mol_type = other DNA
cgggcttcagccagac

SEQ ID NO: 1693 - DNA, 16 bp, synthetic construct
  source 1..16: mol_type = other DNA
tgctgaaagcgggctt

SEQ ID NO: 1694 - DNA, 16 bp, synthetic construct
  source 1..16: mol_type = other DNA
gtgctgaaagcgggct

SEQ ID NO: 1695 - DNA, 16 bp, synthetic construct
  source 1..16: mol_type = other DNA
cgtgctgaaagcgggc

SEQ ID NO: 1696 - DNA, 16 bp, synthetic construct
  source 1..16: mol_type = other DNA
tcagcccctggttacg

SEQ ID NO: 1697 - DNA, 16 bp, synthetic construct
  source 1..16: mol_type = other DNA
attgtcagcccctggt

SEQ ID NO: 1698 - DNA, 16 bp, synthetic construct
  source 1..16: mol_type = other DNA
gcattgtcagcccctg

SEQ ID NO: 1699 - DNA, 16 bp, synthetic construct
  source 1..16: mol_type = other DNA
cgcattgtcagcccct

SEQ ID NO: 1700 - DNA, 16 bp, synthetic construct
  source 1..16: mol_type = other DNA
tcgcattgtcagcccc

SEQ ID NO: 1701 - DNA, 16 bp, synthetic construct
  source 1..16: mol_type = other DNA
ctcgcattgtcagccc

SEQ ID NO: 1702 - DNA, 16 bp, synthetic construct
  source 1..16: mol_type = other DNA
cctcgcattgtcagcc

SEQ ID NO: 1703 - DNA, 16 bp, synthetic construct
  source 1..16: mol_type = other DNA
acctcgcattgtcagc

SEQ ID NO: 1704 - DNA, 16 bp, synthetic construct
  source 1..16: mol_type = other DNA
gacctcgcattgtcag

SEQ ID NO: 1705 - DNA, 16 bp, synthetic construct
  source 1..16: mol_type = other DNA
cgacctcgcattgtca

SEQ ID NO: 1706 - DNA, 16 bp, synthetic construct
  source 1..16: mol_type = other DNA
gcgacctcgcattgtc

SEQ ID NO: 1707 - DNA, 16 bp, synthetic construct
  source 1..16: mol_type = other DNA
tgcgacctcgcattgt

SEQ ID NO: 1708 - DNA, 16 bp, synthetic construct
  source 1..16: mol_type = other DNA
ttgcgacctcgcattg

SEQ ID NO: 1709 - DNA, 16 bp, synthetic construct
  source 1..16: mol_type = other DNA
gttgcgacctcgcatt

SEQ ID NO: 1710 - DNA, 16 bp, synthetic construct
  source 1..16: mol_type = other DNA
agttgcgacctcgcat

SEQ ID NO: 1711 - DNA, 16 bp, synthetic construct
  source 1..16: mol_type = other DNA
cagttgcgacctcgca

SEQ ID NO: 1712 - DNA, 16 bp, synthetic construct
  source 1..16: mol_type = other DNA
tcagttgcgacctcgc

SEQ ID NO: 1713 - DNA, 16 bp, synthetic construct
  source 1..16: mol_type = other DNA
ctcagttgcgacctcg

SEQ ID NO: 1714 - DNA, 16 bp, synthetic construct
  source 1..16: mol_type = other DNA
tctcagttgcgacctc

SEQ ID NO: 1715 - DNA, 16 bp, synthetic construct
  source 1..16: mol_type = other DNA
atctcagttgcgacct

SEQ ID NO: 1716 - DNA, 16 bp, synthetic construct
  source 1..16: mol_type = other DNA
gatctcagttgcgacc

SEQ ID NO: 1717 - DNA, 16 bp, synthetic construct
  source 1..16: mol_type = other DNA
agatctcagttgcgac

SEQ ID NO: 1718 - DNA, 16 bp, synthetic construct
  source 1..16: mol_type = other DNA
gagatctcagttgcga

SEQ ID NO: 1719 - DNA, 16 bp, synthetic construct
  source 1..16: mol_type = other DNA
ggagatctcagttgcg

SEQ ID NO: 1720 - DNA, 16 bp, synthetic construct
  source 1..16: mol_type = other DNA
tcatggagatctcagt

SEQ ID NO: 1721 - DNA, 16 bp, synthetic construct
  source 1..16: mol_type = other DNA
gtcatggagatctcag

SEQ ID NO: 1722 - DNA, 16 bp, synthetic construct
  source 1..16: mol_type = other DNA
agtcatggagatctca

SEQ ID NO: 1723 - DNA, 16 bp, synthetic construct
  source 1..16: mol_type = other DNA
cagtcatggagatctc

SEQ ID NO: 1724 - DNA, 16 bp, synthetic construct
  source 1..16: mol_type = other DNA
acagtcatggagatct

SEQ ID NO: 1725 - DNA, 16 bp, synthetic construct
  source 1..16: mol_type = other DNA
aacacacagtcatgga

SEQ ID NO: 1726 - DNA, 16 bp, synthetic construct
  source 1..16: mol_type = other DNA
caacacacagtcatgg

SEQ ID NO: 1727 - DNA, 16 bp, synthetic construct
  source 1..16: mol_type = other DNA
catcctatccgtgttc

SEQ ID NO: 1728 - DNA, 16 bp, synthetic construct
  source 1..16: mol_type = other DNA
catgaacatcctatcc

SEQ ID NO: 1729 - DNA, 16 bp, synthetic construct
  source 1..16: mol_type = other DNA
tattccatgaacatcc

SEQ ID NO: 1730 - DNA, 16 bp, synthetic construct
  source 1..16: mol_type = other DNA
gtcaacatattccatg

SEQ ID NO: 1731 - DNA, 16 bp, synthetic construct
  source 1..16: mol_type = other DNA
cctgtcaacatattcc

SEQ ID NO: 1732 - DNA, 16 bp, synthetic construct
  source 1..16: mol_type = other DNA
tgtcctgtcaacatat

SEQ ID NO: 1733 - DNA, 16 bp, synthetic construct
  source 1..16: mol_type = other DNA
gccaacagtttcaact

SEQ ID NO: 1734 - DNA, 16 bp, synthetic construct
  source 1..16: mol_type = other DNA
ttctgccaacagtttc

SEQ ID NO: 1735 - DNA, 16 bp, synthetic construct
  source 1..16: mol_type = other DNA
caatattgactttggg

SEQ ID NO: 1736 - DNA, 16 bp, synthetic construct
  source 1..16: mol_type = other DNA
tgcttggcttcaatat

SEQ ID NO: 1737 - DNA, 16 bp, synthetic construct
  source 1..16: mol_type = other DNA
actgcaggcaatattt

SEQ ID NO: 1738 - DNA, 16 bp, synthetic construct
  source 1..16: mol_type = other DNA
gcactgcaggcaatat

SEQ ID NO: 1739 - DNA, 16 bp, synthetic construct
  source 1..16: mol_type = other DNA
ctaatgtggcactgca

SEQ ID NO: 1740 - DNA, 16 bp, synthetic construct
  source 1..16: mol_type = other DNA
tgttctaatgtggcac

SEQ ID NO: 1741 - DNA, 16 bp, synthetic construct
  source 1..16: mol_type = other DNA
gctgttctaatgtggc

SEQ ID NO: 1742 - DNA, 16 bp, synthetic construct
  source 1..16: mol_type = other DNA
tgactagtgaatggct

SEQ ID NO: 1743 - DNA, 16 bp, synthetic construct
  source 1..16: mol_type = other DNA
tctgactagtgaatgg

SEQ ID NO: 1744 - DNA, 16 bp, synthetic construct
  source 1..16: mol_type = other DNA
tcaatctgactagtga

SEQ ID NO: 1745 - DNA, 16 bp, synthetic construct
  source 1..16: mol_type = other DNA
ggtcaatctgactagt

SEQ ID NO: 1746 - DNA, 16 bp, synthetic construct
  source 1..16: mol_type = other DNA
ctggtcaatctgacta

SEQ ID NO: 1747 - DNA, 16 bp, synthetic construct
  source 1..16: mol_type = other DNA
ctctggtcaatctgac

SEQ ID NO: 1748 - DNA, 16 bp, synthetic construct
  source 1..16: mol_type = other DNA
caatctctggtcaatc

SEQ ID NO: 1749 - DNA, 16 bp, synthetic construct
  source 1..16: mol_type = other DNA
caacaatctctggtca

SEQ ID NO: 1750 - DNA, 16 bp, synthetic construct
  source 1..16: mol_type = other DNA
accaacaatctctggt

SEQ ID NO: 1751 - DNA, 16 bp, synthetic construct
  source 1..16: mol_type = other DNA
agcccaccaacaatct

SEQ ID NO: 1752 - DNA, 16 bp, synthetic construct
  source 1..16: mol_type = other DNA
gacagcccaccaacaa

SEQ ID NO: 1753 - DNA, 16 bp, synthetic construct
  source 1..16: mol_type = other DNA
cagacagcccaccaac

SEQ ID NO: 1754 - DNA, 16 bp, synthetic construct
  source 1..16: mol_type = other DNA
gcatagaccccaacag

SEQ ID NO: 1755 - DNA, 16 bp, synthetic construct
  source 1..16: mol_type = other DNA
gtgcatagaccccaac

SEQ ID NO: 1756 - DNA, 16 bp, synthetic construct
  source 1..16: mol_type = other DNA
ctgtgcatagacccca

SEQ ID NO: 1757 - DNA, 16 bp, synthetic construct
  source 1..16: mol_type = other DNA
tcctgtgcatagaccc

SEQ ID NO: 1758 - DNA, 16 bp, synthetic construct
  source 1..16: mol_type = other DNA
gaaatcctgtgcatag

SEQ ID NO: 1759 - DNA, 16 bp, synthetic construct
  source 1..16: mol_type = other DNA
gcagaaatcctgtgca

SEQ ID NO: 1760 - DNA, 16 bp, synthetic construct
  source 1..16: mol_type = other DNA
actccagcagaaatcc

SEQ ID NO: 1761 - DNA, 16 bp, synthetic construct
  source 1..16: mol_type = other DNA
aatcatgccttgtggg

SEQ ID NO: 1762 - DNA, 16 bp, synthetic construct
  source 1..16: mol_type = other DNA
tagacccagaatcatg

SEQ ID NO: 1763 - DNA, 16 bp, synthetic construct
  source 1..16: mol_type = other DNA
ccatagacccagaatc

SEQ ID NO: 1764 - DNA, 16 bp, synthetic construct
  source 1..16: mol_type = other DNA
agtcaccatagaccca

SEQ ID NO: 1765 - DNA, 16 bp, synthetic construct
  source 1..16: mol_type = other DNA
taagtcaccatagacc

SEQ ID NO: 1766 - DNA, 16 bp, synthetic construct
  source 1..16: mol_type = other DNA
gtggccctcttaagtc

SEQ ID NO: 1767 - DNA, 16 bp, synthetic construct
  source 1..16: mol_type = other DNA
gttgtgtggccctctt

SEQ ID NO: 1768 - DNA, 16 bp, synthetic construct
  source 1..16: mol_type = other DNA
cattgttgtgtggccc

SEQ ID NO: 1769 - DNA, 16 bp, synthetic construct
  source 1..16: mol_type = other DNA
tactcattgttgtgtg

SEQ ID NO: 1770 - DNA, 16 bp, synthetic construct
  source 1..16: mol_type = other DNA
aatactcattgttgtg

SEQ ID NO: 1771 - DNA, 16 bp, synthetic construct
  source 1..16: mol_type = other DNA
gccatacatctgagga

SEQ ID NO: 1772 - DNA, 16 bp, synthetic construct
  source 1..16: mol_type = other DNA
attgtagccatacatc

SEQ ID NO: 1773 - DNA, 16 bp, synthetic construct
  source 1..16: mol_type = other DNA
ttattgtagccataca

SEQ ID NO: 1774 - DNA, 16 bp, synthetic construct
  source 1..16: mol_type = other DNA
tctagatgacctgaag

SEQ ID NO: 1775 - DNA, 16 bp, synthetic construct
  source 1..16: mol_type = other DNA
tacatctagatgacct

SEQ ID NO: 1776 - DNA, 16 bp, synthetic construct
  source 1..16: mol_type = other DNA
gtatacatctagatga

SEQ ID NO: 1777 - DNA, 16 bp, synthetic construct
  source 1..16: mol_type = other DNA
actcgcctttgtgact

SEQ ID NO: 1778 - DNA, 16 bp, synthetic construct
  source 1..16: mol_type = other DNA
tactcgcctttgtgac

SEQ ID NO: 1779 - DNA, 16 bp, synthetic construct
  source 1..16: mol_type = other DNA
atactcgcctttgtga

SEQ ID NO: 1780 - DNA, 16 bp, synthetic construct
  source 1..16: mol_type = other DNA
catactcgcctttgtg

SEQ ID NO: 1781 - DNA, 16 bp, synthetic construct
  source 1..16: mol_type = other DNA
gcatactcgcctttgt

SEQ ID NO: 1782 - DNA, 16 bp, synthetic construct
  source 1..16: mol_type = other DNA
atgcatactcgccttt

SEQ ID NO: 1783 - DNA, 16 bp, synthetic construct
  source 1..16: mol_type = other DNA
catgcatactcgcctt

SEQ ID NO: 1784 - DNA, 16 bp, synthetic construct
  source 1..16: mol_type = other DNA
ccatgcatactcgcct

SEQ ID NO: 1785 - DNA, 16 bp, synthetic construct
  source 1..16: mol_type = other DNA
ttccatgcatactcgc

SEQ ID NO: 1786 - DNA, 16 bp, synthetic construct
  source 1..16: mol_type = other DNA
cgattttccatgcata

SEQ ID NO: 1787 - DNA, 16 bp, synthetic construct
  source 1..16: mol_type = other DNA
tgcgattttccatgca

SEQ ID NO: 1788 - DNA, 16 bp, synthetic construct
  source 1..16: mol_type = other DNA
tgtgatgcgattttcc

SEQ ID NO: 1789 - DNA, 16 bp, synthetic construct
  source 1..16: mol_type = other DNA
ctttgtgatgcgattt

SEQ ID NO: 1790 - DNA, 16 bp, synthetic construct
  source 1..16: mol_type = other DNA
gcctttgtgatgcgat

SEQ ID NO: 1791 - DNA, 16 bp, synthetic construct
  source 1..16: mol_type = other DNA
actcgcctttgtgatg

SEQ ID NO: 1792 - DNA, 16 bp, synthetic construct
  source 1..16: mol_type = other DNA
tactcgcctttgtgat

SEQ ID NO: 1793 - DNA, 16 bp, synthetic construct
  source 1..16: mol_type = other DNA
cccatgcatactcgcc

SEQ ID NO: 1794 - DNA, 16 bp, synthetic construct
  source 1..16: mol_type = other DNA
ccccatgcatactcgc

SEQ ID NO: 1795 - DNA, 16 bp, synthetic construct
  source 1..16: mol_type = other DNA
gctccccatgcatact

SEQ ID NO: 1796 - DNA, 16 bp, synthetic construct
  source 1..16: mol_type = other DNA
agtgctccccatgcat

SEQ ID NO: 1797 - DNA, 16 bp, synthetic construct
  source 1..16: mol_type = other DNA
caagtgctccccatgc

SEQ ID NO: 1798 - DNA, 16 bp, synthetic construct
  source 1..16: mol_type = other DNA
gtgatgaaagtacagc

SEQ ID NO: 1799 - DNA, 16 bp, synthetic construct
  source 1..16: mol_type = other DNA
aggagtttgtcagaac

SEQ ID NO: 1800 - DNA, 16 bp, synthetic construct
  source 1..16: mol_type = other DNA
ttcagggagtgatgtc

SEQ ID NO: 1801 - DNA, 16 bp, synthetic construct
  source 1..16: mol_type = other DNA
cctatccgtgttcagc

SEQ ID NO: 1802 - DNA, 16 bp, synthetic construct
  source 1..16: mol_type = other DNA
ctctacatactcagga

SEQ ID NO: 1803 - DNA, 16 bp, synthetic construct
  source 1..16: mol_type = other DNA
cagtccaaaaatccct

SEQ ID NO: 1804 - DNA, 16 bp, synthetic construct
  source 1..16: mol_type = other DNA
cctcttgatttgggca

SEQ ID NO: 1805 - DNA, 16 bp, synthetic construct
  source 1..16: mol_type = other DNA
ttggccaactctgtgg

SEQ ID NO: 1806 - DNA, 16 bp, synthetic construct
  source 1..16: mol_type = other DNA
gacctccagactactg

SEQ ID NO: 1807 - DNA, 16 bp, synthetic construct
  source 1..16: mol_type = other DNA
tgtgtctagggagttg

SEQ ID NO: 1808 - DNA, 16 bp, synthetic construct
  source 1..16: mol_type = other DNA
agcacacaattactgg

SEQ ID NO: 1809 - DNA, 16 bp, synthetic construct
  source 1..16: mol_type = other DNA
ctgctggttttagacc

SEQ ID NO: 1810 - DNA, 16 bp, synthetic construct
  source 1..16: mol_type = other DNA
ttcacttaccacagga

SEQ ID NO: 1811 - DNA, 16 bp, synthetic construct
  source 1..16: mol_type = other DNA
ggtgccacttgcttgg

SEQ ID NO: 1812 - DNA, 16 bp, synthetic construct
  source 1..16: mol_type = other DNA
aatctccacccccgaa

SEQ ID NO: 1813 - DNA, 16 bp, synthetic construct
  source 1..16: mol_type = other DNA
tacctgacaagtggtc

SEQ ID NO: 1814 - DNA, 16 bp, synthetic construct
  source 1..16: mol_type = other DNA
gtcccaagacattcct

SEQ ID NO: 1815 - DNA, 16 bp, synthetic construct
  source 1..16: mol_type = other DNA
cagagtgtcatctgcg

SEQ ID NO: 1816 - DNA, 16 bp, synthetic construct
  source 1..16: mol_type = other DNA
ggattggacccagaca

SEQ ID NO: 1817 - DNA, 16 bp, synthetic construct
  source 1..16: mol_type = other DNA
ggttccctagcggtcc

SEQ ID NO: 1818 - DNA, 16 bp, synthetic construct
  source 1..16: mol_type = other DNA
cacctagaactatcca

SEQ ID NO: 1819 - DNA, 16 bp, synthetic construct
  source 1..16: mol_type = other DNA
ctccctctgtaatgat

SEQ ID NO: 1820 - DNA, 16 bp, synthetic construct
  source 1..16: mol_type = other DNA
ggttgagggacagaca

SEQ ID NO: 1821 - DNA, 16 bp, synthetic construct
  source 1..16: mol_type = other DNA
gtgggtttgcacatgg

SEQ ID NO: 1822 - DNA, 16 bp, synthetic construct
  source 1..16: mol_type = other DNA
ggcttatgctccttct

SEQ ID NO: 1823 - DNA, 16 bp, synthetic construct
  source 1..16: mol_type = other DNA
ccccctgtagttggct

SEQ ID NO: 1824 - DNA, 16 bp, synthetic construct
  source 1..16: mol_type = other DNA
gcttacttacatccct

SEQ ID NO: 1825 - DNA, 16 bp, synthetic construct
  source 1..16: mol_type = other DNA
gggactacatgcaata

SEQ ID NO: 1826 - DNA, 16 bp, synthetic construct
  source 1..16: mol_type = other DNA
gtcaaagagtgtccac

SEQ ID NO: 1827 - DNA, 16 bp, synthetic construct
  source 1..16: mol_type = other DNA
gaatagcaagctccaa

SEQ ID NO: 1828 - DNA, 16 bp, synthetic construct
  source 1..16: mol_type = other DNA
catgataccacaccac

SEQ ID NO: 1829 - DNA, 16 bp, synthetic construct
  source 1..16: mol_type = other DNA
gagcactcttattagc

SEQ ID NO: 1830 - DNA, 16 bp, synthetic construct
  source 1..16: mol_type = other DNA
cctgttagagttggcc

SEQ ID NO: 1831 - DNA, 16 bp, synthetic construct
  source 1..16: mol_type = other DNA
aggacactgtttccag

SEQ ID NO: 1832 - DNA, 16 bp, synthetic construct
  source 1..16: mol_type = other DNA
gtcaccagaaccacat

SEQ ID NO: 1833 - DNA, 16 bp, synthetic construct
  source 1..16: mol_type = other DNA
gtgtgcactttctggt

SEQ ID NO: 1834 - DNA, 16 bp, synthetic construct
  source 1..16: mol_type = other DNA
ctctgattgggtcacc

SEQ ID NO: 1835 - DNA, 16 bp, synthetic construct
  source 1..16: mol_type = other DNA
accaacaactcaggcc

SEQ ID NO: 1836 - DNA, 16 bp, synthetic construct
  source 1..16: mol_type = other DNA
actctcaagctccacg

SEQ ID NO: 1837 - DNA, 16 bp, synthetic construct
  source 1..16: mol_type = other DNA
ggacaatatgtctcct

SEQ ID NO: 1838 - DNA, 16 bp, synthetic construct
  source 1..16: mol_type = other DNA
cattgtgctcaactga

SEQ ID NO: 1839 - DNA, 16 bp, synthetic construct
  source 1..16: mol_type = other DNA
gcccatggtgaatctg

SEQ ID NO: 1840 - DNA, 16 bp, synthetic construct
  source 1..16: mol_type = other DNA
cctagtacaaagtggc

SEQ ID NO: 1841 - DNA, 16 bp, synthetic construct
  source 1..16: mol_type = other DNA
gccattttatccctga

SEQ ID NO: 1842 - DNA, 16 bp, synthetic construct
  source 1..16: mol_type = other DNA
gggcccccatgtccat

SEQ ID NO: 1843 - DNA, 16 bp, synthetic construct
  source 1..16: mol_type = other DNA
gttcttgcttatcctc

SEQ ID NO: 1844 - DNA, 16 bp, synthetic construct
  source 1..16: mol_type = other DNA
atgtgacagtcaggga

SEQ ID NO: 1845 - DNA, 16 bp, synthetic construct
  source 1..16: mol_type = other DNA
ttctgcaactgagcct

SEQ ID NO: 1846 - DNA, 16 bp, synthetic construct
  source 1..16: mol_type = other DNA
aatggcaggtcctggc

SEQ ID NO: 1847 - DNA, 16 bp, synthetic construct
  source 1..16: mol_type = other DNA
agacagttggtggttt

SEQ ID NO: 1848 - DNA, 16 bp, synthetic construct
  source 1..16: mol_type = other DNA
gaggagttggtttagt

SEQ ID NO: 1849 - DNA, 16 bp, synthetic construct
  source 1..16: mol_type = other DNA
tgaccacctctcgggt

SEQ ID NO: 1850 - DNA, 16 bp, synthetic construct
  source 1..16: mol_type = other DNA
atttggccctgagccc

SEQ ID NO: 1851 - DNA, 16 bp, synthetic construct
  source 1..16: mol_type = other DNA
gcctttgagggagtgg

SEQ ID NO: 1852 - DNA, 16 bp, synthetic construct
  source 1..16: mol_type = other DNA
acaacctgtccattcc

SEQ ID NO: 1853 - DNA, 16 bp, synthetic construct
  source 1..16: mol_type = other DNA
gttgtcaactgggacc

SEQ ID NO: 1854 - DNA, 16 bp, synthetic construct
  source 1..16: mol_type = other DNA
ctgttcaggtagcaca

SEQ ID NO: 1855 - DNA, 16 bp, synthetic construct
  source 1..16: mol_type = other DNA
ccgggaaagactgtct

SEQ ID NO: 1856 - DNA, 16 bp, synthetic construct
  source 1..16: mol_type = other DNA
actgcaccccacatat

SEQ ID NO: 1857 - DNA, 16 bp, synthetic construct
  source 1..16: mol_type = other DNA
cctcatctcagtatga

SEQ ID NO: 1858 - DNA, 16 bp, synthetic construct
  source 1..16: mol_type = other DNA
gcacacagacttgccc

SEQ ID NO: 1859 - DNA, 16 bp, synthetic construct
  source 1..16: mol_type = other DNA
ctgcatctggactatg

SEQ ID NO: 1860 - DNA, 16 bp, synthetic construct
  source 1..16: mol_type = other DNA
agggaaattagaggca

SEQ ID NO: 1861 - DNA, 16 bp, synthetic construct
  source 1..16: mol_type = other DNA
ctgttgcctgacatgc

SEQ ID NO: 1862 - DNA, 16 bp, synthetic construct
  source 1..16: mol_type = other DNA
acataaattccccaca

SEQ ID NO: 1863 - DNA, 16 bp, synthetic construct
  source 1..16: mol_type = other DNA
cccactgactgactac

SEQ ID NO: 1864 - DNA, 16 bp, synthetic construct
  source 1..16: mol_type = other DNA
tcctgtgacagaacca

SEQ ID NO: 1865 - DNA, 16 bp, synthetic construct
  source 1..16: mol_type = other DNA
ctacacctttctgcac

SEQ ID NO: 1866 - DNA, 16 bp, synthetic construct
  source 1..16: mol_type = other DNA
ggtccttgaaccccgt

SEQ ID NO: 1867 - DNA, 16 bp, synthetic construct
  source 1..16: mol_type = other DNA
agcagatctgggttgt

SEQ ID NO: 1868 - DNA, 16 bp, synthetic construct
  source 1..16: mol_type = other DNA
gactagcttctactac

SEQ ID NO: 1869 - DNA, 16 bp, synthetic construct
  source 1..16: mol_type = other DNA
acaatcccttagccca

SEQ ID NO: 1870 - DNA, 16 bp, synthetic construct
  source 1..16: mol_type = other DNA
gatgaaatgtgcacct

SEQ ID NO: 1871 - DNA, 16 bp, synthetic construct
  source 1..16: mol_type = other DNA
gactgtgctatccgct

SEQ ID NO: 1872 - DNA, 16 bp, synthetic construct
  source 1..16: mol_type = other DNA
gctcactataggcccc

SEQ ID NO: 1873 - DNA, 16 bp, synthetic construct
  source 1..16: mol_type = other DNA
tagcatcatgccacag

SEQ ID NO: 1874 - DNA, 16 bp, synthetic construct
  source 1..16: mol_type = other DNA
gcacattaggaggtag

SEQ ID NO: 1875 - DNA, 16 bp, synthetic construct
  source 1..16: mol_type = other DNA
taccgctgggtgcggt

SEQ ID NO: 1876 - DNA, 16 bp, synthetic construct
  source 1..16: mol_type = other DNA
atgaaactgtggctcg

SEQ ID NO: 1877 - DNA, 16 bp, synthetic construct
  source 1..16: mol_type = other DNA
acatgtgggatcagag

SEQ ID NO: 1878 - DNA, 16 bp, synthetic construct
  source 1..16: mol_type = other DNA
gatgatcctcacatac

SEQ ID NO: 1879 - DNA, 16 bp, synthetic construct
  source 1..16: mol_type = other DNA
tagaaccttcctccac

SEQ ID NO: 1880 - DNA, 16 bp, synthetic construct
  source 1..16: mol_type = other DNA
ggaagacttccctctg

SEQ ID NO: 1881 - DNA, 16 bp, synthetic construct
  source 1..16: mol_type = other DNA
tagtgataagagctgg

SEQ ID NO: 1882 - DNA, 16 bp, synthetic construct
  source 1..16: mol_type = other DNA
ggcaactatgttctca

SEQ ID NO: 1883 - DNA, 16 bp, synthetic construct
  source 1..16: mol_type = other DNA
ctaactccatcactgc

SEQ ID NO: 1884 - DNA, 16 bp, synthetic construct
  source 1..16: mol_type = other DNA
tccccaatacttgctg

SEQ ID NO: 1885 - DNA, 16 bp, synthetic construct
  source 1..16: mol_type = other DNA
gctgttctaagcgaga

SEQ ID NO: 1886 - DNA, 16 bp, synthetic construct
  source 1..16: mol_type = other DNA
tgagtgatgccttcca

SEQ ID NO: 1887 - DNA, 16 bp, synthetic construct
  source 1..16: mol_type = other DNA
tccagaatactgcccc

SEQ ID NO: 1888 - DNA, 16 bp, synthetic construct
  source 1..16: mol_type = other DNA
gcgctaacctcataaa

SEQ ID NO: 1889 - DNA, 16 bp, synthetic construct
  source 1..16: mol_type = other DNA
ctggaaacgagacaca

SEQ ID NO: 1890 - DNA, 16 bp, synthetic construct
  source 1..16: mol_type = other DNA
gagagagatgttccct

SEQ ID NO: 1891 - DNA, 16 bp, synthetic construct
  source 1..16: mol_type = other DNA
ctgctggttgagaatc

SEQ ID NO: 1892 - DNA, 16 bp, synthetic construct
  source 1..16: mol_type = other DNA
atgtccccagtggaag

SEQ ID NO: 1893 - DNA, 16 bp, synthetic construct
  source 1..16: mol_type = other DNA
gcatcctccctagttg

SEQ ID NO: 1894 - DNA, 16 bp, synthetic construct
  source 1..16: mol_type = other DNA
tgttggtcagcattca

SEQ ID NO: 1895 - DNA, 16 bp, synthetic construct
  source 1..16: mol_type = other DNA
gacgactgccctgtgc

SEQ ID NO: 1896 - DNA, 16 bp, synthetic construct
  source 1..16: mol_type = other DNA
atttgggcctagtggt

SEQ ID NO: 1897 - DNA, 16 bp, synthetic construct
  source 1..16: mol_type = other DNA
cctagtcctcaagttt

SEQ ID NO: 1898 - DNA, 16 bp, synthetic construct
  source 1..16: mol_type = other DNA
caagacatcagtagct

SEQ ID NO: 1899 - DNA, 16 bp, synthetic construct
  source 1..16: mol_type = other DNA
cttatcagtcccagtc

SEQ ID NO: 1900 - DNA, 16 bp, synthetic construct
  source 1..16: mol_type = other DNA
gacaacccatcagttg

SEQ ID NO: 1901 - DNA, 16 bp, synthetic construct
  source 1..16: mol_type = other DNA
cagcaggctcaaagtg

SEQ ID NO: 1902 - DNA, 16 bp, synthetic construct
  source 1..16: mol_type = other DNA
tggctaagtcaggccc

SEQ ID NO: 1903 - DNA, 16 bp, synthetic construct
  source 1..16: mol_type = other DNA
tgtactccacctcacg

SEQ ID NO: 1904 - DNA, 16 bp, synthetic construct
  source 1..16: mol_type = other DNA
agcaagctaagtgagt

SEQ ID NO: 1905 - DNA, 16 bp, synthetic construct
  source 1..16: mol_type = other DNA
gttcttgagtgtagag

SEQ ID NO: 1906 - DNA, 16 bp, synthetic construct
  source 1..16: mol_type = other DNA
gtgttcatacggaagc

SEQ ID NO: 1907 - DNA, 16 bp, synthetic construct
  source 1..16: mol_type = other DNA
gttgggatgcgactct

SEQ ID NO: 1908 - DNA, 16 bp, synthetic construct
  source 1..16: mol_type = other DNA
acgaagtctctttcct

SEQ ID NO: 1909 - DNA, 16 bp, synthetic construct
  source 1..16: mol_type = other DNA
cgatgagttgggcagg

SEQ ID NO: 1910 - DNA, 16 bp, synthetic construct
  source 1..16: mol_type = other DNA
gatacctttccactcc

SEQ ID NO: 1911 - DNA, 16 bp, synthetic construct
  source 1..16: mol_type = other DNA
tccccaagattatgtg

SEQ ID NO: 1912 - DNA, 16 bp, synthetic construct
  source 1..16: mol_type = other DNA
gcacccttttcattga

SEQ ID NO: 1913 - DNA, 16 bp, synthetic construct
  source 1..16: mol_type = other DNA
tcgacttctcctgtct

SEQ ID NO: 1914 - DNA, 16 bp, synthetic construct
  source 1..16: mol_type = other DNA
gcctttgacctttcgc

SEQ ID NO: 1915 - DNA, 16 bp, synthetic construct
  source 1..16: mol_type = other DNA
gtgtgctgaggtttgc

SEQ ID NO: 1916 - DNA, 16 bp, synthetic construct
  source 1..16: mol_type = other DNA
gcaagatgcatgcagc

SEQ ID NO: 1917 - DNA, 16 bp, synthetic construct
  source 1..16: mol_type = other DNA
atcgaactctgcttga

SEQ ID NO: 1918 - DNA, 16 bp, synthetic construct
  source 1..16: mol_type = other DNA
gcccagttttggcaac

SEQ ID NO: 1919 - DNA, 16 bp, synthetic construct
  source 1..16: mol_type = other DNA
cccactaccatttggg

SEQ ID NO: 1920 - DNA, 16 bp, synthetic construct
  source 1..16: mol_type = other DNA
caactataacagtatc

SEQ ID NO: 1921 - DNA, 16 bp, synthetic construct
  source 1..16: mol_type = other DNA
ctataccacggtaact

SEQ ID NO: 1922 - DNA, 16 bp, synthetic construct
  source 1..16: mol_type = other DNA
cctatatcactgtaac

SEQ ID NO: 1923 - DNA, 16 bp, synthetic construct
  source 1..16: mol_type = other DNA
acctatatcactgtaa

SEQ ID NO: 1924 - DNA, 16 bp, synthetic construct
  source 1..16: mol_type = other DNA
tcactgtacctatatc

SEQ ID NO: 1925 - DNA, 16 bp, synthetic construct
  source 1..16: mol_type = other DNA
gtcctataactatatc

SEQ ID NO: 1926 - DNA, 16 bp, synthetic construct
  source 1..16: mol_type = other DNA
ctgtacctataactgt

SEQ ID NO: 1927 - DNA, 16 bp, synthetic construct
  source 1..16: mol_type = other DNA
cgtcactgtacctata

SEQ ID NO: 1928 - DNA, 16 bp, synthetic construct
  source 1..16: mol_type = other DNA
catcactgtacctata

SEQ ID NO: 1929 - DNA, 16 bp, synthetic construct
  source 1..16: mol_type = other DNA
caacatcactgtacct

SEQ ID NO: 1930 - DNA, 16 bp, synthetic construct
  source 1..16: mol_type = other DNA
ttccctacccctggta

SEQ ID NO: 1931 - DNA, 16 bp, synthetic construct
  source 1..16: mol_type = other DNA
ggtggaatgtcatggc

SEQ ID NO: 1932 - DNA, 16 bp, synthetic construct
  source 1..16: mol_type = other DNA
gcggaaaactggccgt

SEQ ID NO: 1933 - DNA, 16 bp, synthetic construct
  source 1..16: mol_type = other DNA
cccaatacagggccag

SEQ ID NO: 1934 - DNA, 16 bp, synthetic construct
  source 1..16: mol_type = other DNA
ccaaccttcccaatct

SEQ ID NO: 1935 - DNA, 16 bp, synthetic construct
  source 1..16: mol_type = other DNA
gaaggtgtgctgtcgc

SEQ ID NO: 1936 - DNA, 16 bp, synthetic construct
  source 1..16: mol_type = other DNA
atcgagtcctgcctcc

SEQ ID NO: 1937 - DNA, 16 bp, synthetic construct
  source 1..16: mol_type = other DNA
gcaaatccttccagca

SEQ ID NO: 1938 - DNA, 16 bp, synthetic construct
  source 1..16: mol_type = other DNA
gcacgagcttgcctgt

SEQ ID NO: 1939 - DNA, 16 bp, synthetic construct
  source 1..16: mol_type = other DNA
gagccatccagggtgc

SEQ ID NO: 1940 - DNA, 16 bp, synthetic construct
  source 1..16: mol_type = other DNA
aggccatttgatccga

SEQ ID NO: 1941 - DNA, 16 bp, synthetic construct
  source 1..16: mol_type = other DNA
gccacgcccttagcag

SEQ ID NO: 1942 - DNA, 16 bp, synthetic construct
  source 1..16: mol_type = other DNA
gttccctgaggaacgg

SEQ ID NO: 1943 - DNA, 16 bp, synthetic construct
  source 1..16: mol_type = other DNA
ggcagttaggccagga

SEQ ID NO: 1944 - DNA, 16 bp, synthetic construct
  source 1..16: mol_type = other DNA
ctacagatcatcccta

SEQ ID NO: 1945 - DNA, 16 bp, synthetic construct
  source 1..16: mol_type = other DNA
ccccggagcaccttca

SEQ ID NO: 1946 - DNA, 16 bp, synthetic construct
  source 1..16: mol_type = other DNA
gtgacccaagggtcga

SEQ ID NO: 1947 - DNA, 16 bp, synthetic construct
  source 1..16: mol_type = other DNA
cgtggttagcctgaca

SEQ ID NO: 1948 - DNA, 16 bp, synthetic construct
  source 1..16: mol_type = other DNA
tccatgtcagagttgc

SEQ ID NO: 1949 - DNA, 16 bp, synthetic construct
  source 1..16: mol_type = other DNA
cctccttttggcttga

SEQ ID NO: 1950 - DNA, 16 bp, synthetic construct
  source 1..16: mol_type = other DNA
ttccccagaggtgata

SEQ ID NO: 1951 - DNA, 16 bp, synthetic construct
  source 1..16: mol_type = other DNA
tctggttagcctccga

SEQ ID NO: 1952 - DNA, 16 bp, synthetic construct
  source 1..16: mol_type = other DNA
tggccaagcaaccagt

SEQ ID NO: 1953 - DNA, 16 bp, synthetic construct
  source 1..16: mol_type = other DNA
gcccaatgtcctaacc

SEQ ID NO: 1954 - DNA, 16 bp, synthetic construct
  source 1..16: mol_type = other DNA
ccaccgctgcccgcca

SEQ ID NO: 1955 - DNA, 16 bp, synthetic construct
  source 1..16: mol_type = other DNA
tgtgaccccccaccgc

SEQ ID NO: 1956 - DNA, 16 bp, synthetic construct
  source 1..16: mol_type = other DNA
ttgtgaccccccaccg

SEQ ID NO: 1957 - DNA, 16 bp, synthetic construct
  source 1..16: mol_type = other DNA
actgaacccccttagg

SEQ ID NO: 1958 - DNA, 16 bp, synthetic construct
  source 1..16: mol_type = other DNA
ccttcatacccctcac

SEQ ID NO: 1959 - DNA, 16 bp, synthetic construct
  source 1..16: mol_type = other DNA
ccgataacagaccggc

SEQ ID NO: 1960 - DNA, 16 bp, synthetic construct
  source 1..16: mol_type = other DNA
atacccggagtcagga

SEQ ID NO: 1961 - DNA, 16 bp, synthetic construct
  source 1..16: mol_type = other DNA
attgctcaggccccct

SEQ ID NO: 1962 - DNA, 16 bp, synthetic construct
  source 1..16: mol_type = other DNA
caagccactaacccac

SEQ ID NO: 1963 - DNA, 16 bp, synthetic construct
  source 1..16: mol_type = other DNA
aattcttggaccaagg

SEQ ID NO: 1964 - DNA, 16 bp, synthetic construct
  source 1..16: mol_type = other DNA
ccatctactcccccat

SEQ ID NO: 1965 - DNA, 16 bp, synthetic construct
  source 1..16: mol_type = other DNA
gcagcgagcattccaa

SEQ ID NO: 1966 - DNA, 16 bp, synthetic construct
  source 1..16: mol_type = other DNA
ggacaatgcctatgct

SEQ ID NO: 1967 - DNA, 16 bp, synthetic construct
  source 1..16: mol_type = other DNA
gaagccattcactgca

SEQ ID NO: 1968 - DNA, 16 bp, synthetic construct
  source 1..16: mol_type = other DNA
aaactcctctcaaggc

SEQ ID NO: 1969 - DNA, 16 bp, synthetic construct
  source 1..16: mol_type = other DNA
gcaccaccatgcggtt

SEQ ID NO: 1970 - DNA, 16 bp, synthetic construct
  source 1..16: mol_type = other DNA
tgcagggctgcgcagt

SEQ ID NO: 1971 - DNA, 16 bp, synthetic construct
  source 1..16: mol_type = other DNA
ttagccactcctcttg

SEQ ID NO: 1972 - DNA, 16 bp, synthetic construct
  source 1..16: mol_type = other DNA
agctagctgaccccaa

SEQ ID NO: 1973 - DNA, 16 bp, synthetic construct
  source 1..16: mol_type = other DNA
tccgcctttggatact

SEQ ID NO: 1974 - DNA, 16 bp, synthetic construct
  source 1..16: mol_type = other DNA
cctgctgattgtgtct

SEQ ID NO: 1975 - DNA, 16 bp, synthetic construct
  source 1..16: mol_type = other DNA
tcgaggacagccccca

SEQ ID NO: 1976 - DNA, 16 bp, synthetic construct
  source 1..16: mol_type = other DNA
acccgtcagcctcagc

SEQ ID NO: 1977 - DNA, 16 bp, synthetic construct
  source 1..16: mol_type = other DNA
cttgcctattcacccc

SEQ ID NO: 1978 - DNA, 16 bp, synthetic construct
  source 1..16: mol_type = other DNA
cggacaagccttacag

SEQ ID NO: 1979 - DNA, 16 bp, synthetic construct
  source 1..16: mol_type = other DNA
cacacttaccccgctc

SEQ ID NO: 1980 - DNA, 16 bp, synthetic construct
  source 1..16: mol_type = other DNA
cctccccttgtgtgtc

SEQ ID NO: 1981 - DNA, 16 bp, synthetic construct
  source 1..16: mol_type = other DNA
ccgcttccctgactgt

SEQ ID NO: 1982 - DNA, 16 bp, synthetic construct
  source 1..16: mol_type = other DNA
cagctcccttactagg

SEQ ID NO: 1983 - DNA, 16 bp, synthetic construct
  source 1..16: mol_type = other DNA
aggtattgaccgccag

SEQ ID NO: 1984 - DNA, 16 bp, synthetic construct
  source 1..16: mol_type = other DNA
ggtaaatccatcccct

SEQ ID NO: 1985 - DNA, 16 bp, synthetic construct
  source 1..16: mol_type = other DNA
gcccgatcaccttaga

SEQ ID NO: 1986 - DNA, 16 bp, synthetic construct
  source 1..16: mol_type = other DNA
gtctaactggcctggc

SEQ ID NO: 1987 - DNA, 16 bp, synthetic construct
  source 1..16: mol_type = other DNA
ctaagctgtgtctcat

SEQ ID NO: 1988 - DNA, 16 bp, synthetic construct
  source 1..16: mol_type = other DNA
tgtttcaagtgccaga

SEQ ID NO: 1989 - DNA, 16 bp, synthetic construct
  source 1..16: mol_type = other DNA
tgcagtggtcaagcat

SEQ ID NO: 1990 - DNA, 16 bp, synthetic construct
  source 1..16: mol_type = other DNA
gcgattccttgcctct

SEQ ID NO: 1991 - DNA, 16 bp, synthetic construct
  source 1..16: mol_type = other DNA
ataatagaggcagcca

SEQ ID NO: 1992 - DNA, 16 bp, synthetic construct
  source 1..16: mol_type = other DNA
gtcagaaggcctctta

SEQ ID NO: 1993 - DNA, 16 bp, synthetic construct
  source 1..16: mol_type = other DNA
tatttatccgacctct

SEQ ID NO: 1994 - DNA, 16 bp, synthetic construct
  source 1..16: mol_type = other DNA
gaggtggttggagcta

SEQ ID NO: 1995 - DNA, 16 bp, synthetic construct
  source 1..16: mol_type = other DNA
cagatcccaattcttc

SEQ ID NO: 1996 - DNA, 16 bp, synthetic construct
  source 1..16: mol_type = other DNA
gagtctttccaatcct

SEQ ID NO: 1997 - DNA, 16 bp, synthetic construct
  source 1..16: mol_type = other DNA
tctcaatcccaacccc

SEQ ID NO: 1998 - DNA, 16 bp, synthetic construct
  source 1..16: mol_type = other DNA
cctcaatcccaaccca

SEQ ID NO: 1999 - DNA, 16 bp, synthetic construct
  source 1..16: mol_type = other DNA
tagtggcaagaaccac

SEQ ID NO: 2000 - DNA, 16 bp, synthetic construct
  source 1..16: mol_type = other DNA
cgcgcgaatgcctgcc

SEQ ID NO: 2001 - DNA, 16 bp, synthetic construct
  source 1..16: mol_type = other DNA
gacacctgcttgatta

SEQ ID NO: 2002 - DNA, 16 bp, synthetic construct
  source 1..16: mol_type = other DNA
ggcactggtcatggac

SEQ ID NO: 2003 - DNA, 16 bp, synthetic construct
  source 1..16: mol_type = other DNA
gcgccatccttcaatc

SEQ ID NO: 2004 - DNA, 16 bp, synthetic construct
  source 1..16: mol_type = other DNA
gatccacccatgacct

SEQ ID NO: 2005 - DNA, 16 bp, synthetic construct
  source 1..16: mol_type = other DNA
gctgtgactcagatca

SEQ ID NO: 2006 - DNA, 16 bp, synthetic construct
  source 1..16: mol_type = other DNA
ctcttcgcatggacac

SEQ ID NO: 2007 - DNA, 16 bp, synthetic construct
  source 1..16: mol_type = other DNA
gcccaagcctacatgc

SEQ ID NO: 2008 - DNA, 16 bp, synthetic construct
  source 1..16: mol_type = other DNA
gtgcgattaagcccca

SEQ ID NO: 2009 - DNA, 16 bp, synthetic construct
  source 1..16: mol_type = other DNA
gcttgtagaagggatt

SEQ ID NO: 2010 - DNA, 16 bp, synthetic construct
  source 1..16: mol_type = other DNA
tgtgcaatcaggtgga

SEQ ID NO: 2011 - DNA, 16 bp, synthetic construct
  source 1..16: mol_type = other DNA
ccggcctggatacagc

SEQ ID NO: 2012 - DNA, 16 bp, synthetic construct
  source 1..16: mol_type = other DNA
cggccaatgggaaagg

SEQ ID NO: 2013 - DNA, 16 bp, synthetic construct
  source 1..16: mol_type = other DNA
tggaggagtagggaat

SEQ ID NO: 2014 - DNA, 16 bp, synthetic construct
  source 1..16: mol_type = other DNA
cccgaagagtcaagtc

SEQ ID NO: 2015 - DNA, 16 bp, synthetic construct
  source 1..16: mol_type = other DNA
gtgctgcattgcatga

SEQ ID NO: 2016 - DNA, 16 bp, synthetic construct
  source 1..16: mol_type = other DNA
acacgccaggtgaaaa

SEQ ID NO: 2017 - DNA, 16 bp, synthetic construct
  source 1..16: mol_type = other DNA
atgcatgcctacccaa

SEQ ID NO: 2018 - DNA, 16 bp, synthetic construct
  source 1..16: mol_type = other DNA
gttactctgtgatcca

SEQ ID NO: 2019 - DNA, 16 bp, synthetic construct
  source 1..16: mol_type = other DNA
aacattgtgtagctgc

SEQ ID NO: 2020 - DNA, 16 bp, synthetic construct
  source 1..16: mol_type = other DNA
gagactgaagccctca

SEQ ID NO: 2021 - DNA, 16 bp, synthetic construct
  source 1..16: mol_type = other DNA
cactgcctagaaaggc

SEQ ID NO: 2022 - DNA, 16 bp, synthetic construct
  source 1..16: mol_type = other DNA
tgtagtatccagagta

SEQ ID NO: 2023 - DNA, 16 bp, synthetic construct
  source 1..16: mol_type = other DNA
agatgacctgcagatg

SEQ ID NO: 2024 - DNA, 16 bp, synthetic construct
  source 1..16: mol_type = other DNA
aaaccatgaattaggt

SEQ ID NO: 2025 - DNA, 16 bp, synthetic construct
  source 1..16: mol_type = other DNA
ttgctactttacacca

SEQ ID NO: 2026 - DNA, 16 bp, synthetic construct
  source 1..16: mol_type = other DNA
ggcattaggataggca

SEQ ID NO: 2027 - DNA, 16 bp, synthetic construct
  source 1..16: mol_type = other DNA
cactcagactgtctga

SEQ ID NO: 2028 - DNA, 16 bp, synthetic construct
  source 1..16: mol_type = other DNA
agatccggaataacca

SEQ ID NO: 2029 - DNA, 16 bp, synthetic construct
  source 1..16: mol_type = other DNA
attgacaaccatccta

SEQ ID NO: 2030 - DNA, 16 bp, synthetic construct
  source 1..16: mol_type = other DNA
actcattggtctacag

SEQ ID NO: 2031 - DNA, 16 bp, synthetic construct
  source 1..16: mol_type = other DNA
atgccttgtgcctatt

SEQ ID NO: 2032 - DNA, 16 bp, synthetic construct
  source 1..16: mol_type = other DNA
actctgaggccttagg

SEQ ID NO: 2033 - DNA, 16 bp, synthetic construct
  source 1..16: mol_type = other DNA
gcattactcagcatgt

SEQ ID NO: 2034 - DNA, 16 bp, synthetic construct
  source 1..16: mol_type = other DNA
ccagtcaccaccattg

SEQ ID NO: 2035 - DNA, 16 bp, synthetic construct
  source 1..16: mol_type = other DNA
ggtctaactctaaggg

SEQ ID NO: 2036 - DNA, 16 bp, synthetic construct
  source 1..16: mol_type = other DNA
tgtcctttaaagtatc

SEQ ID NO: 2037 - DNA, 16 bp, synthetic construct
  source 1..16: mol_type = other DNA
tcatgtggcaacctgt

SEQ ID NO: 2038 - DNA, 16 bp, synthetic construct
  source 1..16: mol_type = other DNA
aatctgcacctggcag

SEQ ID NO: 2039 - DNA, 16 bp, synthetic construct
  source 1..16: mol_type = other DNA
catggctattgcttcc

SEQ ID NO: 2040 - DNA, 16 bp, synthetic construct
  source 1..16: mol_type = other DNA
gggctatattgccagc

SEQ ID NO: 2041 - DNA, 16 bp, synthetic construct
  source 1..16: mol_type = other DNA
ccagagccttgatcag

SEQ ID NO: 2042 - DNA, 16 bp, synthetic construct
  source 1..16: mol_type = other DNA
ggtgggttatctgaga

SEQ ID NO: 2043 - DNA, 16 bp, synthetic construct
  source 1..16: mol_type = other DNA
tagctccatgctgtgt

SEQ ID NO: 2044 - DNA, 16 bp, synthetic construct
  source 1..16: mol_type = other DNA
gggaatttatgctgcc

SEQ ID NO: 2045 - DNA, 16 bp, synthetic construct
  source 1..16: mol_type = other DNA
tgatgaagttccacct

SEQ ID NO: 2046 - DNA, 16 bp, synthetic construct
  source 1..16: mol_type = other DNA
taggcacagacaacct

SEQ ID NO: 2047 - DNA, 16 bp, synthetic construct
  source 1..16: mol_type = other DNA
tccaactacaggactc

SEQ ID NO: 2048 - DNA, 16 bp, synthetic construct
  source 1..16: mol_type = other DNA
ttctgggaaactctct

SEQ ID NO: 2049 - DNA, 16 bp, synthetic construct
  source 1..16: mol_type = other DNA
agctcacacccaaaaa

SEQ ID NO: 2050 - DNA, 16 bp, synthetic construct
  source 1..16: mol_type = other DNA
tctgttaccttgagga

SEQ ID NO: 2051 - DNA, 16 bp, synthetic construct
  source 1..16: mol_type = other DNA
tggtcatgtcaactgt

SEQ ID NO: 2052 - DNA, 16 bp, synthetic construct
  source 1..16: mol_type = other DNA
gtaagccttcacaggg

SEQ ID NO: 2053 - DNA, 16 bp, synthetic construct
  source 1..16: mol_type = other DNA
ctcaccagagttgtcc

SEQ ID NO: 2054 - DNA, 16 bp, synthetic construct
  source 1..16: mol_type = other DNA
catccctgacaggtcc

SEQ ID NO: 2055 - DNA, 16 bp, synthetic construct
  source 1..16: mol_type = other DNA
cccttctaaccaagga

SEQ ID NO: 2056 - DNA, 16 bp, synthetic construct
  source 1..16: mol_type = other DNA
ggatgagatgcatcca

SEQ ID NO: 2057 - DNA, 16 bp, synthetic construct
  source 1..16: mol_type = other DNA
atggcggtgaagcagc

SEQ ID NO: 2058 - DNA, 16 bp, synthetic construct
  source 1..16: mol_type = other DNA
tgaataccatccccgc

SEQ ID NO: 2059 - DNA, 16 bp, synthetic construct
  source 1..16: mol_type = other DNA
gcgccatctgccctgt

SEQ ID NO: 2060 - DNA, 16 bp, synthetic construct
  source 1..16: mol_type = other DNA
tgggttggaggagtgg

SEQ ID NO: 2061 - DNA, 16 bp, synthetic construct
  source 1..16: mol_type = other DNA
tggtggtgggattggt

SEQ ID NO: 2062 - DNA, 16 bp, synthetic construct
  source 1..16: mol_type = other DNA
ttggtggtgggattgg

SEQ ID NO: 2063 - DNA, 16 bp, synthetic construct
  source 1..16: mol_type = other DNA
ggtggtggaattggtg

SEQ ID NO: 2064 - DNA, 16 bp, synthetic construct
  source 1..16: mol_type = other DNA
gagattggtggtgggt

SEQ ID NO: 2065 - DNA, 16 bp, synthetic construct
  source 1..16: mol_type = other DNA
gtggtgggattggtgc

SEQ ID NO: 2066 - DNA, 16 bp, synthetic construct
  source 1..16: mol_type = other DNA
tggcgggattggtggt

SEQ ID NO: 2067 - DNA, 16 bp, synthetic construct
  source 1..16: mol_type = other DNA
cggtggtgggattggt

SEQ ID NO: 2068 - DNA, 16 bp, synthetic construct
  source 1..16: mol_type = other DNA
tcggtggtgggattgg

SEQ ID NO: 2069 - DNA, 16 bp, synthetic construct
  source 1..16: mol_type = other DNA
atcggtggtgggattg

SEQ ID NO: 2070 - DNA, 16 bp, synthetic construct
  source 1..16: mol_type = other DNA
gatcggtggtgggatt

SEQ ID NO: 2071 - DNA, 16 bp, synthetic construct
  source 1..16: mol_type = other DNA
ggatcggtggtgggat

SEQ ID NO: 2072 - DNA, 16 bp, synthetic construct
  source 1..16: mol_type = other DNA
gcgggatcggtggtgg

SEQ ID NO: 2073 - DNA, 16 bp, synthetic construct
  source 1..16: mol_type = other DNA
ggcgggatcggtggtg

SEQ ID NO: 2074 - DNA, 16 bp, synthetic construct
  source 1..16: mol_type = other DNA
gagcaaatacagtcca

SEQ ID NO: 2075 - DNA, 16 bp, synthetic construct
  source 1..16: mol_type = other DNA
gtctcgatggcaagct

SEQ ID NO: 2076 - DNA, 16 bp, synthetic construct
  source 1..16: mol_type = other DNA
ctcaccggtactctgc

SEQ ID NO: 2077 - DNA, 16 bp, synthetic construct
  source 1..16: mol_type = other DNA
tcctggaggcaccaat

SEQ ID NO: 2078 - DNA, 16 bp, synthetic construct
  source 1..16: mol_type = other DNA
agccctgtttggtttt

SEQ ID NO: 2079 - DNA, 16 bp, synthetic construct
  source 1..16: mol_type = other DNA
tgaagggcgaggcgca

SEQ ID NO: 2080 - DNA, 16 bp, synthetic construct
  source 1..16: mol_type = other DNA
aagaggatgtcaggct

SEQ ID NO: 2081 - DNA, 16 bp, synthetic construct
  source 1..16: mol_type = other DNA
ttgaggaaagacctgc

SEQ ID NO: 2082 - DNA, 16 bp, synthetic construct
  source 1..16: mol_type = other DNA
gctgagtgtgacttaa

SEQ ID NO: 2083 - DNA, 16 bp, synthetic construct
  source 1..16: mol_type = other DNA
gtacatgactccagtg

SEQ ID NO: 2084 - DNA, 16 bp, synthetic construct
  source 1..16: mol_type = other DNA
gtagagcatggagcga

SEQ ID NO: 2085 - DNA, 16 bp, synthetic construct
  source 1..16: mol_type = other DNA
cgcttcaggaaagcga

SEQ ID NO: 2086 - DNA, 16 bp, synthetic construct
  source 1..16: mol_type = other DNA
ggcaggagactccgtg

SEQ ID NO: 2087 - DNA, 16 bp, synthetic construct
  source 1..16: mol_type = other DNA
atccttcccctcgcaa

SEQ ID NO: 2088 - DNA, 16 bp, synthetic construct
  source 1..16: mol_type = other DNA
taatgagtgggttagg

SEQ ID NO: 2089 - DNA, 16 bp, synthetic construct
  source 1..16: mol_type = other DNA
ggagcagtgcaggtaa

SEQ ID NO: 2090 - DNA, 16 bp, synthetic construct
  source 1..16: mol_type = other DNA
ataggcaattgttcct

SEQ ID NO: 2091 - DNA, 16 bp, synthetic construct
  source 1..16: mol_type = other DNA
agtcctacaattacca

SEQ ID NO: 2092 - DNA, 16 bp, synthetic construct
  source 1..16: mol_type = other DNA
gggctcctattccacc

SEQ ID NO: 2093 - DNA, 16 bp, synthetic construct
  source 1..16: mol_type = other DNA
gccagctatgggaaca

SEQ ID NO: 2094 - DNA, 16 bp, synthetic construct
  source 1..16: mol_type = other DNA
ccccatctcgaagccc

SEQ ID NO: 2095 - DNA, 16 bp, synthetic construct
  source 1..16: mol_type = other DNA
gagtacattgggccca

SEQ ID NO: 2096 - DNA, 16 bp, synthetic construct
  source 1..16: mol_type = other DNA
gagccttccgcctctc

SEQ ID NO: 2097 - DNA, 16 bp, synthetic construct
  source 1..16: mol_type = other DNA
cggaccttcatcttca

SEQ ID NO: 2098 - DNA, 16 bp, synthetic construct
  source 1..16: mol_type = other DNA
tctagaggccgcctgc

SEQ ID NO: 2099 - DNA, 16 bp, synthetic construct
  source 1..16: mol_type = other DNA
cctataactgctgctc

SEQ ID NO: 2100 - DNA, 16 bp, synthetic construct
  source 1..16: mol_type = other DNA
gtatcactgtactagt

SEQ ID NO: 2101 - DNA, 16 bp, synthetic construct
  source 1..16: mol_type = other DNA
agtatcactgtactag

SEQ ID NO: 2102 - DNA, 16 bp, synthetic construct
  source 1..16: mol_type = other DNA
cagtatcactgtacta

SEQ ID NO: 2103 - DNA, 16 bp, synthetic construct
  source 1..16: mol_type = other DNA
taacagtatcactgta

SEQ ID NO: 2104 - DNA, 16 bp, synthetic construct
  source 1..16: mol_type = other DNA
ctaacagtatcactgt

SEQ ID NO: 2105 - DNA, 16 bp, synthetic construct
  source 1..16: mol_type = other DNA
tctaacagtatcactg

SEQ ID NO: 2106 - DNA, 16 bp, synthetic construct
  source 1..16: mol_type = other DNA
ataactctaacagtat

SEQ ID NO: 2107 - DNA, 16 bp, synthetic construct
  source 1..16: mol_type = other DNA
ctataactctaacagt

SEQ ID NO: 2108 - DNA, 16 bp, synthetic construct
  source 1..16: mol_type = other DNA
actgtcctataactct

SEQ ID NO: 2109 - DNA, 16 bp, synthetic construct
  source 1..16: mol_type = other DNA
tatatcactgtcctat

SEQ ID NO: 2110 - DNA, 16 bp, synthetic construct
  source 1..16: mol_type = other DNA
cctatatcactgtcct

SEQ ID NO: 2111 - DNA, 16 bp, synthetic construct
  source 1..16: mol_type = other DNA
tcctatatcactgtcc

SEQ ID NO: 2112 - DNA, 16 bp, synthetic construct
  source 1..16: mol_type = other DNA
cactgtcctatatcac

SEQ ID NO: 2113 - DNA, 16 bp, synthetic construct
  source 1..16: mol_type = other DNA
gtatcactgtcctata

SEQ ID NO: 2114 - DNA, 16 bp, synthetic construct
  source 1..16: mol_type = other DNA
agtatcactgtcctat

SEQ ID NO: 2115 - DNA, 16 bp, synthetic construct
  source 1..16: mol_type = other DNA
cagtatcactgtccta

SEQ ID NO: 2116 - DNA, 16 bp, synthetic construct
  source 1..16: mol_type = other DNA
aacagtatcactgtcc

SEQ ID NO: 2117 - DNA, 16 bp, synthetic construct
  source 1..16: mol_type = other DNA
tataacagtatcactg

SEQ ID NO: 2118 - DNA, 16 bp, synthetic construct
  source 1..16: mol_type = other DNA
ctataacagtatcact

SEQ ID NO: 2119 - DNA, 16 bp, synthetic construct
  source 1..16: mol_type = other DNA
taactataacagtatc

SEQ ID NO: 2120 - DNA, 16 bp, synthetic construct
  source 1..16: mol_type = other DNA
tataactataacagta

SEQ ID NO: 2121 - DNA, 16 bp, synthetic construct
  source 1..16: mol_type = other DNA
cctataactataacag

SEQ ID NO: 2122 - DNA, 16 bp, synthetic construct
  source 1..16: mol_type = other DNA
tacctataactctaac

SEQ ID NO: 2123 - DNA, 16 bp, synthetic construct
  source 1..16: mol_type = other DNA
actgtacctataactc

SEQ ID NO: 2124 - DNA, 16 bp, synthetic construct
  source 1..16: mol_type = other DNA
tatcactgtacctata

SEQ ID NO: 2125 - DNA, 16 bp, synthetic construct
  source 1..16: mol_type = other DNA
acaatatcactgtacc

SEQ ID NO: 2126 - DNA, 16 bp, synthetic construct
  source 1..16: mol_type = other DNA
aacaatatcactgtac

SEQ ID NO: 2127 - DNA, 16 bp, synthetic construct
  source 1..16: mol_type = other DNA
atatcactgtacctgt

SEQ ID NO: 2128 - DNA, 16 bp, synthetic construct
  source 1..16: mol_type = other DNA
tatatcactgtacctg

SEQ ID NO: 2129 - DNA, 16 bp, synthetic construct
  source 1..16: mol_type = other DNA
ctatatcactgtacct

SEQ ID NO: 2130 - DNA, 16 bp, synthetic construct
  source 1..16: mol_type = other DNA
cctatatcactgtacc

SEQ ID NO: 2131 - DNA, 16 bp, synthetic construct
  source 1..16: mol_type = other DNA
cctataacagtatcac

SEQ ID NO: 2132 - DNA, 16 bp, synthetic construct
  source 1..16: mol_type = other DNA
tcctataacagtatca

SEQ ID NO: 2133 - DNA, 16 bp, synthetic construct
  source 1..16: mol_type = other DNA
ttcctataacagtatc

SEQ ID NO: 2134 - DNA, 16 bp, synthetic construct
  source 1..16: mol_type = other DNA
gtttcctataacagta

SEQ ID NO: 2135 - DNA, 16 bp, synthetic construct
  source 1..16: mol_type = other DNA
ctatgtcactgtacct

SEQ ID NO: 2136 - DNA, 16 bp, synthetic construct
  source 1..16: mol_type = other DNA
cctatgtcactgtacc

SEQ ID NO: 2137 - DNA, 16 bp, synthetic construct
  source 1..16: mol_type = other DNA
tcctatgtcactgtac

SEQ ID NO: 2138 - DNA, 16 bp, synthetic construct
  source 1..16: mol_type = other DNA
cactgtcctatgtcac

SEQ ID NO: 2139 - DNA, 16 bp, synthetic construct
  source 1..16: mol_type = other DNA
tcactgtcctatgtca

SEQ ID NO: 2140 - DNA, 16 bp, synthetic construct
  source 1..16: mol_type = other DNA
atcactgtcctatgtc

SEQ ID NO: 2141 - DNA, 16 bp, synthetic construct
  source 1..16: mol_type = other DNA
ctacctataactctaa

SEQ ID NO: 2142 - DNA, 16 bp, synthetic construct
  source 1..16: mol_type = other DNA
gtcctataactataac

SEQ ID NO: 2143 - DNA, 16 bp, synthetic construct
  source 1..16: mol_type = other DNA
tatatcactgtaccta

SEQ ID NO: 2144 - DNA, 16 bp, synthetic construct
  source 1..16: mol_type = other DNA
tacctataacagtatc

SEQ ID NO: 2145 - DNA, 16 bp, synthetic construct
  source 1..16: mol_type = other DNA
actgtacctataacag

SEQ ID NO: 2146 - DNA, 16 bp, synthetic construct
  source 1..16: mol_type = other DNA
caccgtactagtttcc

SEQ ID NO: 2147 - DNA, 16 bp, synthetic construct
  source 1..16: mol_type = other DNA
tataacagtatcaccg

SEQ ID NO: 2148 - DNA, 16 bp, synthetic construct
  source 1..16: mol_type = other DNA
ctataacagtatcacc

SEQ ID NO: 2149 - DNA, 16 bp, synthetic construct
  source 1..16: mol_type = other DNA
acctataactataaca

SEQ ID NO: 2150 - DNA, 16 bp, synthetic construct
  source 1..16: mol_type = other DNA
tggcgggatcggtggt

SEQ ID NO: 2151 - DNA, 16 bp, synthetic construct
  source 1..16: mol_type = other DNA
tggtggcgggatcggt

SEQ ID NO: 2152 - DNA, 16 bp, synthetic construct
  source 1..16: mol_type = other DNA
ttggtggcgggatcgg

SEQ ID NO: 2153 - DNA, 16 bp, synthetic construct
  source 1..16: mol_type = other DNA
attggtggcgggatcg

SEQ ID NO: 2154 - DNA, 16 bp, synthetic construct
  source 1..16: mol_type = other DNA
gattggtggcgggatc

SEQ ID NO: 2155 - DNA, 16 bp, synthetic construct
  source 1..16: mol_type = other DNA
gttggtggcgggatcg

SEQ ID NO: 2156 - DNA, 16 bp, synthetic construct
  source 1..16: mol_type = other DNA
ggttggtggcgggatc

SEQ ID NO: 2157 - DNA, 16 bp, synthetic construct
  source 1..16: mol_type = other DNA
tggttggtggcgggat

SEQ ID NO: 2158 - DNA, 16 bp, synthetic construct
  source 1..16: mol_type = other DNA
gaacacatcagggatt

SEQ ID NO: 2159 - DNA, 16 bp, synthetic construct
  source 1..16: mol_type = other DNA
tttctatgggcctgac

SEQ ID NO: 2160 - DNA, 16 bp, synthetic construct
  source 1..16: mol_type = other DNA
gctgtcacttaagcca

SEQ ID NO: 2161 - DNA, 16 bp, synthetic construct
  source 1..16: mol_type = other DNA
tctagggccacacctc

SEQ ID NO: 2162 - DNA, 16 bp, synthetic construct
  source 1..16: mol_type = other DNA
gttctacacacagtac

SEQ ID NO: 2163 - DNA, 16 bp, synthetic construct
  source 1..16: mol_type = other DNA
gcagtatgttcaatcc

SEQ ID NO: 2164 - DNA, 16 bp, synthetic construct
  source 1..16: mol_type = other DNA
cccacatgtaccaccg

SEQ ID NO: 2165 - DNA, 16 bp, synthetic construct
  source 1..16: mol_type = other DNA
gtatggcagagcccct

SEQ ID NO: 2166 - DNA, 16 bp, synthetic construct
  source 1..16: mol_type = other DNA
cccatcttgggacttt

SEQ ID NO: 2167 - DNA, 16 bp, synthetic construct
  source 1..16: mol_type = other DNA
tggtcccaaattggag

SEQ ID NO: 2168 - DNA, 16 bp, synthetic construct
  source 1..16: mol_type = other DNA
ctcacaatactgagcc

SEQ ID NO: 2169 - DNA, 16 bp, synthetic construct
  source 1..16: mol_type = other DNA
ggagatatcaggtgca

SEQ ID NO: 2170 - DNA, 16 bp, synthetic construct
  source 1..16: mol_type = other DNA
caaggcatgtgtgcac

SEQ ID NO: 2171 - DNA, 16 bp, synthetic construct
  source 1..16: mol_type = other DNA
gccttattctgtgcaa

SEQ ID NO: 2172 - DNA, 16 bp, synthetic construct
  source 1..16: mol_type = other DNA
aggtgtggcgcgcgcc

SEQ ID NO: 2173 - DNA, 16 bp, synthetic construct
  source 1..16: mol_type = other DNA
ctctatacagctgggc

SEQ ID NO: 2174 - DNA, 16 bp, synthetic construct
  source 1..16: mol_type = other DNA
gctgatcttctaatgc

SEQ ID NO: 2175 - DNA, 16 bp, synthetic construct
  source 1..16: mol_type = other DNA
cctcattgctccacta

SEQ ID NO: 2176 - DNA, 16 bp, synthetic construct
  source 1..16: mol_type = other DNA
tgggaagaaactagca

SEQ ID NO: 2177 - DNA, 16 bp, synthetic construct
  source 1..16: mol_type = other DNA
gaatgttgctgtccca

SEQ ID NO: 2178 - DNA, 16 bp, synthetic construct
  source 1..16: mol_type = other DNA
gcatcatgcttactgc

SEQ ID NO: 2179 - DNA, 16 bp, synthetic construct
  source 1..16: mol_type = other DNA
gcggcagtagtgaatc

SEQ ID NO: 2180 - DNA, 16 bp, synthetic construct
  source 1..16: mol_type = other DNA
cctacctaattcctcc

SEQ ID NO: 2181 - DNA, 16 bp, synthetic construct
  source 1..16: mol_type = other DNA
aactgggcagtccttc

SEQ ID NO: 2182 - DNA, 16 bp, synthetic construct
  source 1..16: mol_type = other DNA
ccagcgcaattctgct

SEQ ID NO: 2183 - DNA, 16 bp, synthetic construct
  source 1..16: mol_type = other DNA
cgtttccctcaactcc

SEQ ID NO: 2184 - DNA, 16 bp, synthetic construct
  source 1..16: mol_type = other DNA
cacggcaagtcgcggg

SEQ ID NO: 2185 - DNA, 16 bp, synthetic construct
  source 1..16: mol_type = other DNA
cagttgtatccctccc

SEQ ID NO: 2186 - DNA, 16 bp, synthetic construct
  source 1..16: mol_type = other DNA
gcctctcagacggcac

SEQ ID NO: 2187 - DNA, 16 bp, synthetic construct
  source 1..16: mol_type = other DNA
ctgatcccacttgccc

SEQ ID NO: 2188 - DNA, 16 bp, synthetic construct
  source 1..16: mol_type = other DNA
agtctctttcctaccc

SEQ ID NO: 2189 - DNA, 16 bp, synthetic construct
  source 1..16: mol_type = other DNA
ccacgatgctctggcc

SEQ ID NO: 2190 - DNA, 16 bp, synthetic construct
  source 1..16: mol_type = other DNA
tcggctcctggcagca

SEQ ID NO: 2191 - DNA, 16 bp, synthetic construct
  source 1..16: mol_type = other DNA
accattcctgaccatg

SEQ ID NO: 2192 - DNA, 16 bp, synthetic construct
  source 1..16: mol_type = other DNA
cccgaggtcacataat

SEQ ID NO: 2193 - DNA, 16 bp, synthetic construct
  source 1..16: mol_type = other DNA
ttacaacagacccagg

SEQ ID NO: 2194 - DNA, 16 bp, synthetic construct
  source 1..16: mol_type = other DNA
agcagggtatcttcac

SEQ ID NO: 2195 - DNA, 16 bp, synthetic construct
  source 1..16: mol_type = other DNA
gaagttcctgtgtctt

SEQ ID NO: 2196 - DNA, 16 bp, synthetic construct
  source 1..16: mol_type = other DNA
ccaacctctaaggcta

SEQ ID NO: 2197 - DNA, 16 bp, synthetic construct
  source 1..16: mol_type = other DNA
atgcttacctttctcc

SEQ ID NO: 2198 - DNA, 16 bp, synthetic construct
  source 1..16: mol_type = other DNA
acgacccactccatgt

SEQ ID NO: 2199 - DNA, 16 bp, synthetic construct
  source 1..16: mol_type = other DNA
tgcttaaaagtctccc

SEQ ID NO: 2200 - DNA, 16 bp, synthetic construct
  source 1..16: mol_type = other DNA
gccctagaagggccca

SEQ ID NO: 2201 - DNA, 16 bp, synthetic construct
  source 1..16: mol_type = other DNA
gcgggtggtcttgcac

SEQ ID NO: 2202 - DNA, 16 bp, synthetic construct
  source 1..16: mol_type = other DNA
gctcccggccattagc

SEQ ID NO: 2203 - DNA, 16 bp, synthetic construct
  source 1..16: mol_type = other DNA
tctccatagtgagacg

SEQ ID NO: 2204 - DNA, 16 bp, synthetic construct
  source 1..16: mol_type = other DNA
tggcaagctaccttct

SEQ ID NO: 2205 - DNA, 16 bp, synthetic construct
  source 1..16: mol_type = other DNA
gggagctttcatggct

SEQ ID NO: 2206 - DNA, 16 bp, synthetic construct
  source 1..16: mol_type = other DNA
aatgcaggccagcatc

SEQ ID NO: 2207 - DNA, 16 bp, synthetic construct
  source 1..16: mol_type = other DNA
gaaaagccctccgagc

SEQ ID NO: 2208 - DNA, 16 bp, synthetic construct
  source 1..16: mol_type = other DNA
caacaatccaaagcct

SEQ ID NO: 2209 - DNA, 16 bp, synthetic construct
  source 1..16: mol_type = other DNA
ccccccagaaatccca

SEQ ID NO: 2210 - DNA, 16 bp, synthetic construct
  source 1..16: mol_type = other DNA
gaccttgcttccatgt

SEQ ID NO: 2211 - DNA, 16 bp, synthetic construct
  source 1..16: mol_type = other DNA
gagagacggcaccctg

SEQ ID NO: 2212 - DNA, 16 bp, synthetic construct
  source 1..16: mol_type = other DNA
gggaaggtagtgttac

SEQ ID NO: 2213 - DNA, 16 bp, synthetic construct
  source 1..16: mol_type = other DNA
gtgaatcagagcagtg

SEQ ID NO: 2214 - DNA, 16 bp, synthetic construct
  source 1..16: mol_type = other DNA
tcacctgtgagtaacc

SEQ ID NO: 2215 - DNA, 16 bp, synthetic construct
  source 1..16: mol_type = other DNA
gagttaccttacaagc

SEQ ID NO: 2216 - DNA, 16 bp, synthetic construct
  source 1..16: mol_type = other DNA
tctcaagcagcctatt

SEQ ID NO: 2217 - DNA, 16 bp, synthetic construct
  source 1..16: mol_type = other DNA
gcccctcttaaatagc

SEQ ID NO: 2218 - DNA, 16 bp, synthetic construct
  source 1..16: mol_type = other DNA
gatatcatcatcccaa

SEQ ID NO: 2219 - DNA, 16 bp, synthetic construct
  source 1..16: mol_type = other DNA
gtatccccttttctat

SEQ ID NO: 2220 - DNA, 16 bp, synthetic construct
  source 1..16: mol_type = other DNA
agtatctcatgtgcct

SEQ ID NO: 2221 - DNA, 16 bp, synthetic construct
  source 1..16: mol_type = other DNA
caagaccttgcttgcc

SEQ ID NO: 2222 - DNA, 16 bp, synthetic construct
  source 1..16: mol_type = other DNA
tagtccactacacagc

SEQ ID NO: 2223 - DNA, 16 bp, synthetic construct
  source 1..16: mol_type = other DNA
acgacaatgggattca

SEQ ID NO: 2224 - DNA, 16 bp, synthetic construct
  source 1..16: mol_type = other DNA
gaatctccctgagtca

SEQ ID NO: 2225 - DNA, 16 bp, synthetic construct
  source 1..16: mol_type = other DNA
tagagggatcccagga

SEQ ID NO: 2226 - DNA, 16 bp, synthetic construct
  source 1..16: mol_type = other DNA
ccaggtgcagcacgga

SEQ ID NO: 2227 - DNA, 27 bp, synthetic construct
  source 1..27: mol_type = other DNA
gcgtttgctcttcttcttgcgtttttt

SEQ ID NO: 2228 - DNA, 21 bp, synthetic construct
  source 1..21: mol_type = other DNA
tgcctgctgttcagctttctc

SEQ ID NO: 2229 - DNA, 21 bp, synthetic construct
  source 1..21: mol_type = other DNA
tggcaaagtccctgtaatgct

SEQ ID NO: 2230 - DNA, 30 bp, synthetic construct
  source 1..30: mol_type = other DNA
cgtgactccacccaaagagacaaataaacg

SEQ ID NO: 2231 - DNA, 27 bp, synthetic construct
  source 1..27: mol_type = other DNA
acaagtgcattttacagaccagagtac

SEQ ID NO: 2232 - DNA, 22 bp, synthetic construct
  source 1..22: mol_type = other DNA
ggttgtccgctgactttatgct

SEQ ID NO: 2233 - DNA, 24 bp, synthetic construct
  source 1..24: mol_type = other DNA
aagcacagtgcaagcggaacaccc

SEQ ID NO: 2234 - DNA, 21 bp, synthetic construct
  source 1..21: mol_type = other DNA
gagtcccccagagcctacagt

SEQ ID NO: 2235 - DNA, 26 bp, synthetic construct
  source 1..26: mol_type = other DNA
tgtcatttgttattgtgatggctaca

SEQ ID NO: 2236 - DNA, 25 bp, synthetic construct
  source 1..25: mol_type = other DNA
ctgccctctacctggccaacaacca

SEQ ID NO: 2237 - DNA, 27 bp, synthetic construct
  source 1..27: mol_type = other DNA
acaagtgcattttacagaccagagtac

SEQ ID NO: 2238 - DNA, 22 bp, synthetic construct
  source 1..22: mol_type = other DNA
ggttgtccgctgactttatgct

SEQ ID NO: 2239 - DNA, 24 bp, synthetic construct
  source 1..24: mol_type = other DNA
aagcacagtgcaagcggaacaccc

SEQ ID NO: 2240 - DNA, 25 bp, synthetic construct
  source 1..25: mol_type = other DNA
agacccatttcctcaaggtagaact

SEQ ID NO: 2241 - DNA, 16 bp, synthetic construct
  source 1..16: mol_type = other DNA
cgcagcgacgctcatg

SEQ ID NO: 2242 - DNA, 25 bp, synthetic construct
  source 1..25: mol_type = other DNA
tctttgggtccagtggcaccctctt

SEQ ID NO: 2243 - DNA, 1837 bp, Mus musculus
  source 1..1837: mol_type = other DNA
actgattctctgcgactgtctgctcagtctgtcctgaagctgcctagtgaccaagaacttggaccaggacgcagctgacatcgctgcccagatggcctccaggctgaccccactgaccctcctgctgctgctgctggctggggatagagccttctcagatcccgaagctaccagccacagcacccaggatccactggaggctcaagcgaaaagcagagagagcttccctgaaagagatgactcctggagtcccccagagcctacagtactgccctctacctggccaacaaccagtgtagccatcacaataacaaatgacaccatgggtaaagtagccaacgagtccttcagccagcacagccagccagctgctcagctacccacagattctccaggacagccccctctgaattcttccagccagccctccactgcctcagatcttcccacccaggctactactgaacccttctgcccggagccgcttgctcagtgctctgattcagacagagactcctcagaggcaaagctctcagaggctttgacagatttctctgtgaagctctaccacgccttctcagctaccaagatggctaagaccaacatggccttttccccattcagcattgccagcctcctcacacaggttcttcttggggctggagacagcaccaagagcaacttggagagcatcctttcctaccccaaggattttgcctgtgtccaccaagcactaaagggcttttcatccaaaggtgtcacttctgtgtctcagattttccacagcccagatctggccataagggacacctatgtgaatgcatctcagagcctgtatggaagcagccccagagtcctgggcccagacagtgctgctaacttagaactcatcaacacctgggtggctgagaacaccaaccataagatccgcaagctgctggacagcctgccttctgacacctgcctcgtccttctcaatgctgtctacttgagtgccaagtggaagataacatttgaaccaaaaaagatgatggcgcctttcttctacaaaaactctatgattaaagtgcccatgatgagtagcgtaaagtaccctgtggcccaattcgatgaccatactttgaaggccaaggtgggacagctgcagctctctcacaacctgagctttgtgatcgtggtacccgtgttcccaaagcaccaacttaaagatgtagaaaaggctctcaaccccactgtcttcaaggccatcatgaagaagctggagctgtccaaattcctgcccacttacctgacgatgcctcatataaaagtaaagagcagccaagacatgctgtcagtcatggagaaactggaattctttgacttcacttacgatctcaacctgtgcgggctgaccgaggacccagatcttcaggtgtctgccatgaaacacgagacagtgctggaactgacagagtcaggggtggaagcagctgcagcctctgccatctcctttggccgaagcttacccatctttgaggtgcagcgacctttcctcttcctgctctgggaccagcaacacaggttcccagtcttcatgggtcgtgtatatgaccccaggggttgagacaggcttgggtaaacattgtcacccaagcttcagctcctccggttatttccttgccactgcctgcccgagccacttcaagccttaggaactggcagacggaactgtttccatccaccaacccccagggtatcaaccacttttttgcagcttttacggttcaaacctatcaaactctacaaataaaacttgcagacattttcttctctcactaaaaaaaaaaaaaaaaaa

SEQ ID NO: 2244 - DNA, 20 bp, synthetic construct
  source 1..20: mol_type = other DNA
ggcatattggtttttggaat

SEQ ID NO: 2245 - DNA, 20 bp, synthetic construct
  source 1..20: mol_type = other DNA
aaagtggttgataccctggg

SEQ ID NO: 2246 - DNA, 20 bp, synthetic construct
  source 1..20: mol_type = other DNA
ccttccctgaaggttcctcc

SEQ ID NO: 2247 - DNA, 20 bp, synthetic construct
  source 1..20: mol_type = other DNA
gcatgggacagagatggtgc

SEQ ID NO: 2248 - DNA, 20 bp, synthetic construct
  source 1..20: mol_type = other DNA
agcttcttgtccagctttat

SEQ ID NO: 2249 - DNA, 21 bp, synthetic construct
  source 1..21: mol_type = other DNA
agcttcttgtccagctttata

SEQ ID NO: 2250 - DNA, 14 bp, synthetic construct
  source 1..14: mol_type = other DNA
tcagtcatgacttc

SEQ ID NO: 2251 - DNA, 15 bp, synthetic construct
  source 1..15: mol_type = other DNA
tcagtcatgacttca

SEQ ID NO: 2252 - DNA, 20 bp, synthetic construct
  source 1..20: mol_type = other DNA
gctgattagagagaggtccc

SEQ ID NO: 2253 - DNA, 20 bp, synthetic construct
  source 1..20: mol_type = other DNA
tcccatttcaggagacctgg

SEQ ID NO: 2254 - DNA, 15 bp, synthetic construct
  source 1..15: mol_type = other DNA
atcagtcatgacttc

SEQ ID NO: 2255 - DNA, 20 bp, synthetic construct
  source 1..20: mol_type = other DNA
cggtgcaaggcttaggaatt

SEQ ID NO: 2256 - DNA, 20 bp, synthetic construct
  source 1..20: mol_type = other DNA
gcttcagtcatgacttcctt

SEQ ID NO: 2257 - DNA, 21 bp, synthetic construct
  source 1..21: mol_type = other DNA
gcttcagtcatgacttcctta

SEQ ID NO: 2258 - DNA, 21 bp, synthetic construct
  source 1..21: mol_type = other DNA
agcttcagtcatgacttcctt

SEQ ID NO: 2259 - DNA, 20 bp, synthetic construct
  source 1..20: mol_type = other DNA
tggtaatccactttcagagg

SEQ ID NO: 2260 - DNA, 21 bp, synthetic construct
  source 1..21: mol_type = other DNA
tggtaatccactttcagagga

SEQ ID NO: 2261 - DNA, 21 bp, synthetic construct
  source 1..21: mol_type = other DNA
tgcttcagtcatgacttcctt

SEQ ID NO: 2262 - DNA, 20 bp, synthetic construct
  source 1..20: mol_type = other DNA
cactgatttttgcccaggat

SEQ ID NO: 2263 - DNA, 21 bp, synthetic construct
  source 1..21: mol_type = other DNA
cactgatttttgcccaggata

SEQ ID NO: 2264 - DNA, 21 bp, synthetic construct
  source 1..21: mol_type = other DNA
aagcttcttgtccagctttat

SEQ ID NO: 2265 - DNA, 20 bp, synthetic construct
  source 1..20: mol_type = other DNA
acccaattcagaaggaagga

SEQ ID NO: 2266 - DNA, 21 bp, synthetic construct
  source 1..21: mol_type = other DNA
acccaattcagaaggaaggaa

SEQ ID NO: 2267 - DNA, 21 bp, synthetic construct
  source 1..21: mol_type = other DNA
aacccaattcagaaggaagga

SEQ ID NO: 2268 - DNA, 21 bp, synthetic construct
  source 1..21: mol_type = other DNA
atggtaatccactttcagagg

SEQ ID NO: 2269 - DNA, 20 bp, synthetic construct
  source 1..20: mol_type = other DNA
tcttggttacatgaaatccc

SEQ ID NO: 2270 - DNA, 21 bp, synthetic construct
  source 1..21: mol_type = other DNA
tcttggttacatgaaatccca

SEQ ID NO: 2271 - DNA, 20 bp, synthetic construct
  source 1..20: mol_type = other DNA
attcactttcataatgctgg

SEQ ID NO: 2272 - DNA, 21 bp, synthetic construct
  source 1..21: mol_type = other DNA
attcactttcataatgctgga

SEQ ID NO: 2273 - DNA, 21 bp, synthetic construct
  source 1..21: mol_type = other DNA
atcttggttacatgaaatccc

SEQ ID NO: 2274 - DNA, 20 bp, synthetic construct
  source 1..20: mol_type = other DNA
atgcatggtgatgcttctga

SEQ ID NO: 2275 - DNA, 20 bp, synthetic construct
  source 1..20: mol_type = other DNA
cagctttattagggacagca

SEQ ID NO: 2276 - DNA, 21 bp, synthetic construct
  source 1..21: mol_type = other DNA
cagctttattagggacagcaa

SEQ ID NO: 2277 - DNA, 21 bp, synthetic construct
  source 1..21: mol_type = other DNA
acagctttattagggacagca

SEQ ID NO: 2278 - DNA, 16 bp, synthetic construct
  source 1..16: mol_type = other DNA
ttcagtcatgacttcc

SEQ ID NO: 2279 - DNA, 18 bp, synthetic construct
  source 1..18: mol_type = other DNA
  modified_base 3..4: mod_base = OTHER; note = uracil
  modified_base 16: mod_base = OTHER; note = uracil
gcttcagtcatgacttcc

SEQ ID NO: 2280 - DNA, 21 bp, synthetic construct
  source 1..21: mol_type = other DNA
tgctccgttggtgcttgttca

SEQ ID NO: 2281 - DNA, 20 bp, synthetic construct
  source 1..20: mol_type = other DNA
tgctccgttggtgcttgttc

SEQ ID NO: 2282 - DNA, 20 bp, synthetic construct
  source 1..20: mol_type = other DNA
  modified_base 1: mod_base = OTHER; note = 2'-MOE thymidine 3'-phosphorothioate
  modified_base 2: mod_base = OTHER; note = 2'-MOE guanosine 3'-phosphorothioate
  modified_base 3: mod_base = OTHER; note = 2'-MOE 5-methylcytidine 3'-phosphorothioate
  modified_base 4..5: mod_base = OTHER; note = 2'-MOE adenosine 3'-phosphorothioate
  modified_base 6: mod_base = OTHER; note = 2'-deoxyguanosine 3'-phosphorothioate
  modified_base 7: mod_base = OTHER; note = 2'-deoxythymidine 3'-phosphorothioate
  modified_base 8: mod_base = OTHER; note = 5-methyl-2'-deoxycytidine 3'-phosphorothioate
  modified_base 9: mod_base = OTHER; note = 2'-deoxythymidine 3'-phosphorothioate
  modified_base 10: mod_base = OTHER; note = 5-methyl-2'-deoxycytidine 3'-phosphorothioate
  modified_base 11..12: mod_base = OTHER; note = 2'-deoxythymidine 3'-phosphorothioate
  modified_base 13..14: mod_base = OTHER; note = 2'-deoxyguanosine 3'-phosphorothioate
  modified_base 15: mod_base = OTHER; note = 5-methyl-2'-deoxycytidine 3'-phosphorothioate
  modified_base 16..18: mod_base = OTHER; note = 2'-MOE adenosine 3'-phosphorothioate
  modified_base 19: mod_base = OTHER; note = 2'-MOE 5-methylcytidine 3'-phosphorothioate
  modified_base 20: mod_base = OTHER; note = 2'-MOE adenosine
tgcaagtctcttggcaaaca

SEQ ID NO: 2283 - DNA, 20 bp, synthetic construct
  source 1..20: mol_type = other DNA
  modified_base 1: mod_base = OTHER; note = 2'-MOE thymidine 3'-phosphorothioate
  modified_base 2: mod_base = OTHER; note = 2'-MOE guanosine 3'-phosphorothioate
  modified_base 3: mod_base = OTHER; note = 2'-MOE 5-methylcytidine 3'-phosphodiester
  modified_base 4: mod_base = OTHER; note = 2'-MOE adenosine 3'-phosphodiester
  modified_base 5: mod_base = OTHER; note = 2'-MOE adenosine 3'-phosphorothioate
  modified_base 6: mod_base = OTHER; note = 2'-deoxyguanosine 3'-phosphorothioate
  modified_base 7: mod_base = OTHER; note = 2'-deoxythymidine 3'-phosphorothioate
  modified_base 8: mod_base = OTHER; note = 5-methyl-2'-deoxycytidine 3'-phosphorothioate
  modified_base 9: mod_base = OTHER; note = 2'-deoxythymidine 3'-phosphorothioate
  modified_base 10: mod_base = OTHER; note = 5-methyl-2'-deoxycytidine 3'-phosphorothioate
  modified_base 11..12: mod_base = OTHER; note = 2'-deoxythymidine 3'-phosphorothioate
  modified_base 13..14: mod_base = OTHER; note = 2'-deoxyguanosine 3'-phosphorothioate
  modified_base 15: mod_base = OTHER; note = 5-methyl-2'-deoxycytidine 3'-phosphorothioate
  modified_base 16..17: mod_base = OTHER; note = 2'-MOE adenosine 3'-phosphodiester
  modified_base 18: mod_base = OTHER; note = 2'-MOE adenosine 3'-phosphorothioate
  modified_base 19: mod_base = OTHER; note = 2'-MOE 5-methylcytidine 3'-phosphorothioate
  modified_base 20: mod_base = OTHER; note = 2'-MOE adenosine
tgcaagtctcttggcaaaca

1.-219. (canceled)

220. A compound comprising a modified oligonucleotide and a conjugate group, wherein the modified oligonucleotide consists of 12 to 30 linked nucleosides and has a nucleobase sequence comprising at least 18, at least 19, or 20 contiguous nucleobases of any of the nucleobase sequences of SEQ ID NOs: 30-2226,
wherein
the modified oligonucleotide comprises at least one phosphodiester internucleoside linkage; and
the conjugate group is covalently linked to the modified oligonucleotide at the 5′ end of the modified oligonucleotide, and wherein the conjugate group comprises:

[chemical structure]

221. The compound of claim 220, wherein the modified oligonucleotide consists of 18 to 25 linked nucleosides.

222. The compound of claim 221, wherein the modified oligonucleotide has a nucleobase sequence comprising at least 18, at least 19, or 20 contiguous nucleobases of SEQ ID NO: 570.

223. The compound of claim 222, wherein the modified oligonucleotide consists of 18 to 21 linked nucleosides.

224. The compound of claim 220, wherein the compound consists of the modified oligonucleotide and the conjugate group, and wherein the modified oligonucleotide is single-stranded.

225. The compound of claim 220, wherein the nucleobase sequence of the modified oligonucleotide is at least 90%, at least 95%, or 100% complementary to SEQ ID NO: 10.

226. The compound of claim 220, wherein the modified oligonucleotide comprises at least one modified internucleoside linkage.

227. The compound of claim 226, wherein the at least one modified internucleoside linkage is a phosphorothioate internucleoside linkage.

228. The compound of claim 226, wherein each internucleoside linkage of the modified oligonucleotide is independently selected from a phosphodiester internucleoside linkage and a phosphorothioate internucleoside linkage.

229. The compound of claim 228, wherein the modified oligonucleotide comprises at least 2, at least 3, or at least 4 phosphodiester internucleoside linkages.

230. The compound of claim 220 wherein at least one nucleoside of the modified oligonucleotide comprises a modified nucleobase.

231. The compound of claim 230, wherein the modified nucleobase is a 5-methylcytosine.

232. The compound of claim 220, comprising at least one terminal group.

233. The compound of claim 220, wherein the modified oligonucleotide comprises at least one modified sugar selected from a 2′-O-methoxyethyl, a 2′-O-methyl, a constrained ethyl, a LNA, and a 3′-fluoro-HNA.

234. The compound of claim 220, wherein the modified oligonucleotide comprises:
a gap segment consisting of 10 linked deoxynucleosides;
a 5′ wing segment consisting of 5 linked nucleosides; and
a 3′ wing segment consisting of 5 linked nucleosides;
wherein the gap segment is positioned between the 5′ wing segment and the 3′ wing segment and wherein each nucleoside of each wing segment comprises a modified sugar.

235. The compound of claim 234, wherein each modified sugar is a 2′-O-methoxyethyl modified sugar.

236. A composition comprising the compound of claim 1 and at least one of a pharmaceutically acceptable carrier or diluent.

237. The composition of claim 236, wherein the pharmaceutically acceptable carrier or diluent is phosphate-buffered saline (PBS).

238. The composition of claim 236, wherein the composition consists essentially of the compound and PBS.

239. The composition of claim 237, wherein the composition consists of the compound and PBS.

240. A method comprising administering to an animal the compound of claim 220, wherein the animal is human.

241. The method of claim 240, wherein administering the compound prevents, treats, or ameliorates a PKK associated disease, disorder, or condition.

242. The method of claim 241, wherein the PKK associated disease, disorder, or condition is hereditary angioedema (HAE), edema, angioedema, swelling, angioedema of the lids, ocular edema, macular edema, cerebral edema, thrombosis, embolism, thromboembolism, deep vein thrombosis, pulmonary embolism, myocardial infarction, stroke, or infarct.
